(19) United States
(12) Patent Application Publication
(10) Pub. No.: US 2022/0127605 A1
(43) Pub. Date: Apr. 28, 2022

(54) NUCLEIC ACID CONJUGATE

(71) Applicant: KYOWA KIRIN CO., LTD., Tokyo (JP)

(72) Inventors: Hiroto IWAI, Tokyo (JP); Takashi IMAEDA, Tokyo (JP); Hiroyuki ARIYAMA, Tokyo (JP); Takuya MURAKAMI, Tokyo (JP)

(73) Assignee: KYOWA KIRIN CO., LTD., Tokyo (JP)

(21) Appl. No.: 17/298,185

(22) PCT Filed: Dec. 2, 2019
(86) PCT No.: PCT/JP2019/047044

§ 371 Date: May 28, 2021

(30) Foreign Application Priority Data
Nov. 30, 2018 (JP) 2018-225829

(51) Int. Cl. C12N 15/113; A61K 47/54; A61P 25/28; A61K 31/713

(52) U.S. Cl. CPC C12N 15/113; A61K 47/549; C12N 2310/11; A61K 31/713; C12N 2310/351; A61P 25/28

(57) ABSTRACT

The present invention provides a nucleic acid conjugate represented by the following formula 1:

[chemical structure]

wherein X is a double-stranded nucleic acid consisting of a sense strand and an antisense strand and comprising a duplex region of at least 11 base pairs, wherein in the double-stranded nucleic acid, an oligonucleotide strand having a chain length of 17 to 30 nucleotides in the antisense strand is complementary to any of target APCS mRNA sequences described in Tables 1-1 to 1-13, and the 3′ end or the 5′ end of the sense strand binds to S3, L1 and L2 are each independently sugar ligand, and Si, S2 and S3 are each independently a linker.

### TECHNICAL FIELD

[0001] The present invention relates to a nucleic acid conjugate and a pharmaceutical composition comprising the nucleic acid conjugate, etc.

### BACKGROUND ART

[0002] For example, aptamers, antisenses, decoy nucleic acids, ribozymes, siRNA, miRNA and anti-miRNA are known as nucleic acid medicines. Such nucleic acid medicines are expected to be clinically applied to various previously difficult-to-treat diseases, because of their high versatility that permits control of every gene in cells.

[0003] Also, the nucleic acid medicines are expected as next-generation medicines following antibody or low-molecular medicines, because of their high target selectivity and activity in cells.

[0004] However, a problem of the nucleic acid medicines is difficult delivery to a target tissue.

[0005] Use of a conjugate of a targeting compound and a nucleic acid (nucleic acid conjugate) has been reported as one of the methods for effectively delivering the nucleic acid medicines in vivo. Examples of the targeting compound include ligands capable of binding to extracellularly expressed receptors. Among others, there are a plurality of reports on a nucleic acid conjugate that utilizes N-acetyl-D-galactosamine (GalNAc) or the like as a ligand capable of binding to an asialoglycoprotein receptor (ASGPR) very highly expressed on liver cells. In recent years, nucleic acid conjugates containing such ligands bound to siRNAs have been reported to be efficiently delivered to liver cells (Non Patent Literature 1).

[0006] Patent Literatures 1 and 2 disclose, for example, the following nucleic acid conjugate as a conjugate of a targeting compound and an oligonucleotide:

[chemical structure]

wherein Ac represents an acetyl group; hereinafter, the same holds true for the present specification.

[0007] Patent Literature 3 discloses a nucleic acid conjugate having the following structure having a sugar ligand-tether unit similar to that of the nucleic acid conjugates disclosed in Patent Literatures 1 and 2:

[chemical structure]

[0008] Patent Literature 4 discloses a nucleic acid conjugate having the following structure as a sugar ligand-tether unit:

[chemical structure]

[0009] APCS (amyloid P component, serum) (also called serum amyloid P, SAP or pentraxin-2) has a pentamer structure of a glycoprotein constituted by 223 amino acids. APCS is a glycoprotein that is produced in the liver, and is present with a relatively high concentration of 30 to 50 g/mL in blood.

[0010] APCS also has biochemical characteristics of binding to every type of amyloid fibril in a calcium-dependent manner. Patients having amyloid are known to contain APCS in an amount as large as 20,000 mg in the amyloid (Non Patent Literature 2).

[0011] APCS is present in amyloid in every patient with an amyloid-related disease and as such, is used as a diagnostic marker for amyloid-related disease patients (Non Patent Literature 3).

[0012] Amyloid-related diseases are diseases in which aberrant insoluble protein fibrils known as amyloid fibrils accumulate in tissues, causing an organ disorder.

[0013] APCS has been found to induce resistance to degradation by protease or phagocytosis by immunocytes through binding to amyloid so that the amyloid bound with APCS can be stabilized. Research using animal models and clinical research have also strongly suggested that the inhibition of the binding of APCS to amyloid can reduce amyloid accumulation in organs and tissue disorders associated therewith (Non Patent Literatures 4 and 5).

[0014] It can be expected that amyloid-related diseases can be prevented or treated by specifically inhibiting the expression of APCS. Nonetheless, any medicament specifically inhibiting the expression of APCS has not yet been reported.

### CITATION LIST

### Patent Literature

[0015] Patent Literature 1: International Publication No. WO 2009/073809
[0016] Patent Literature 2: International Publication No. WO 2013/075035
[0017] Patent Literature 3: International Publication No. WO 2015/105083
[0018] Patent Literature 4: International Publication No. WO 2014/179620

### Non Patent Literature

[0019] Non Patent Literature 1: Journal of American Chemical Society, 2014, Vol. 136, p. 16958-16961
[0020] Non Patent Literature 2: Amyloid, 1997, Vol. 4:4, p. 274-295
[0021] Non Patent Literature 3: N. Engl. J. Med., 1990, Vol. 323, p. 508-13
[0022] Non Patent Literature 4: Nature, 2010, Vol. 468, p. 93-97
[0023] Non Patent Literature 5: N. Engl. J. Med., 2015, Vol. 373, p. 1106-1114

### SUMMARY OF INVENTION

### Technical Problem

[0024] An object of the present invention is to provide a nucleic acid conjugate capable of inhibiting the expression of APCS.

### Solution to Problem

[0025] The present invention relates to the following.

[1]

[0026] A nucleic acid conjugate represented by the following formula 1:

[chemical structure]

wherein

[0027] X is a double-stranded nucleic acid consisting of a sense strand and an antisense strand and comprising a duplex region of at least 11 base pairs, wherein
[0028] in the double-stranded nucleic acid, an oligonucleotide strand having a chain length of 17 to 30 nucleotides in the antisense strand is complementary to any of target APCS mRNA sequences described in Tables 1-1 to 1-13, and
[0029] a 3′ end or a 5′ end of the sense strand binds to S3,

[0030] L1 and L2 are each independently a sugar ligand, and

[0031] S1, S2 and S3 are each independently a linker.

[2]

[0032] The nucleic acid conjugate according to [1], wherein the nucleic acid conjugate has a structure represented by the following formula 2:

[chemical structure]

[0033] Wherein

[0034] X, L1, L2 and S3 are each as defined above,

[0035] P1, P2, P3, P4, P5 and P6, and T1 and T2 are each independently absent, or —CO—, —NH—, —O—, —S—, —O—CO—, —S—CO—, —NH—CO—, —CO—O—, —CO—S— or —CO—NH—,

[0036] Q1, Q2, Q3 and Q4 are each independently absent, or substituted or unsubstituted alkylene having 1 to 12 carbon atoms or —(CH₂CH₂O)ₙ—CH₂CH₂— wherein n is an integer of 0 to 99,

[0037] B1 and B2 are each independently a bond, or any structure represented by the following formula 2-1, wherein each of the terminal dots in each structure is a binding site to P2 or P3, or P5 or P6, and m1, m2, m3 and m4 are each independently an integer of 0 to 10:

[chemical structure]

[0038] p1 and p2 are each independently an integer of 1, 2 or 3, and

[0039] q1, q2, q3 and q4 are each independently an integer of 0 to 10,

[0040] provided that when each of p1 and p2 is an integer of 2 or 3, each P3 and P6, Q2 and Q4, T1 and T2 or L1 and L2 are the same or different, and when q1 to q4 are 2 to 10, combinations -[P2-Q1]-, -[Q2-P3]—, -[P5-Q3]- or -[Q4-P6]- are the same or different.

[3]

[0041] The nucleic acid conjugate according to [2], wherein P1 and P4 are each independently —CO—NH—, —NH—CO— or —O—.

[4]

[0042] The nucleic acid conjugate according to [2] or [3], wherein -[P2-Q]_{q1}- and -[P5-Q3]_{q3}- are each independently absent, or any structure represented by the following formulas 3-1 to 3-3:

[chemical structure]

wherein

[0043] m5 and m6 are each independently an integer of 0 to 10, and each of the terminal dots in the structures of formulas 3-1 to 3-3 is a binding site to B1 or B2, or P1 or P4.

[5]

[0044] The nucleic acid conjugate according to any one of [2] to [4], wherein the nucleic acid conjugate has any structure represented by the following formulas 4-1 to 4-9:

[chemical structure]

[chemical structure]

[chemical structure]

wherein

[0045] X, L1, L2, S3, P3, P6, T1, T2, Q2, Q4, q2 and q4 are each as defined above.

[6]

[0046] The nucleic acid conjugate according to [1], wherein the nucleic acid conjugate has a structure represented by the following formula 5:

[chemical structure]

wherein

[0047] X, S3, P1, P2, P3, Q1, Q2, B1, T1, L1, p1, q1 and q2 are each as defined above.

[7]

[0048] The nucleic acid conjugate according to [6], wherein P1 is —CO—NH—, —NH—CO— or —O—.

[8]

[0049] The nucleic acid conjugate according to [6] or [7], wherein the nucleic acid conjugate has any structure represented by the following formulas 6-1 to 6-9:

[chemical structure]

[chemical structure]

[chemical structure]

wherein

[0050] X, S3, P3, Q2, T1, L1 and q2 are each as defined above.

[9]

[0051] The nucleic acid conjugate according to any one of

[2] to [5], wherein the nucleic acid conjugate has any structure represented by the following formulas 7-1 to 7-9:

[chemical structure]

[chemical structure]

[chemical structure]

wherein

[0052] X, S3, L1 and L2 are each as defined above.

[10]

[0053] The nucleic acid conjugate according to any one of [1] to [9], wherein the sugar ligand is N-acetylgalactosamine.

[11]

[0054] The nucleic acid conjugate according to any one of [1] to [10], wherein the double-stranded nucleic acid comprises a modified nucleotide.

[12]

[0055] The nucleic acid conjugate according to any one of [1] to [11], wherein the 3′ end of the sense strand and the 5′ end of the antisense strand each form a blunt end.

[13]

[0056] The nucleic acid conjugate according to [11], wherein the double-stranded nucleic acid comprises a nucleotide modified at the sugar moiety.

[14]

[0057] The nucleic acid conjugate according to any one of [1] to [13], wherein the nucleic acid conjugate has a structure represented by the following formula 7-8-1:

[chemical structure]

wherein X is as defined above.
[15]

[0058] The nucleic acid conjugate according to any one of [1] to [14], wherein X is a pair of sense strand/antisense strand selected from the group consisting of sense strands/antisense strands described in Tables 1-1 to 1-13.

[16]

[0059] The nucleic acid conjugate according to any one of [1] to [14], wherein X is a pair of sense strand/antisense strand selected from the group consisting of sense strands/antisense strands described in Tables M1-1 to M1-3, R-1 to R-2 and R-3 to R-4.

### [16-A1]

[0060] The nucleic acid conjugate according to any one of [1] to [14], wherein X is a pair of sense strand/antisense strand consisting of a sense strand with its 3′ end binding to S3 and an antisense strand represented by any of SEQ ID NOs: 2126, 2144 and 2146.

### [16-A2]

[0061] The nucleic acid conjugate according to [16-A1], wherein the nucleic acid conjugate has any structure represented by the following formulas 6-1 to 6-9:

[chemical structure]

wherein

[0062] X, S3, P3, Q2, T1, L1 and q2 are each as defined above.

### [16-A3]

[0063] The nucleic acid conjugate according to [16-A1], wherein the nucleic acid conjugate has a structure represented by the following formula 7-8:

[chemical structure]

wherein

[0064] X, S3, L1 and L2 are each as defined above.

### [16-A4]

[0065] The nucleic acid conjugate according to [16-A1], wherein the nucleic acid conjugate has a structure represented by the following formula 7-8-1:

[chemical structure]

wherein X is as defined above.

### [16-B1]

[0066] The nucleic acid conjugate according to any one of [1] to [14], wherein X is a pair of sense strand/antisense strand consisting of a sense strand of SEQ ID NO: 2083 and an antisense strand of SEQ ID NO: 2126, a sense strand of SEQ ID NO: 2101 and an antisense strand of SEQ ID NO: 2144, or a sense strand of SEQ ID NO: 2103 and an antisense strand of SEQ ID NO: 2146.

### [16-B2]

[0067] The nucleic acid conjugate according to [16-B1], wherein the nucleic acid conjugate has any structure represented by the following formulas 6-1 to 6-9:

[chemical structure]

wherein

[0068] X, S3, P3, Q2, T1, L1 and q2 are each as defined above.

### [16-B3]

[0069] The nucleic acid conjugate according to [16-B1], wherein the nucleic acid conjugate has a structure represented by the following formula 7-8:

[chemical structure]

wherein

[0070] X, S3, L1 and L2 are each as defined above.

### [16-B4]

[0071] The nucleic acid conjugate according to [16-B1], wherein the nucleic acid conjugate has a structure represented by the following formula 7-8-1:

[chemical structure]

wherein X is as defined above.
[17]

[0072] A pharmaceutical composition comprising a nucleic acid conjugate according to any one of [1] to [16].

[18]

[0073] The pharmaceutical composition according to [17], wherein the pharmaceutical composition is for transfer into a cell.

[19]

[0074] The pharmaceutical composition according to [17] or [18], wherein the pharmaceutical composition is intravenously administered or subcutaneously administered.

[20]

[0075] A method for treating or preventing a disease, comprising administering a nucleic acid conjugate according to any one of [1] to [16] or a pharmaceutical composition according to any one of [17] to [19] to a patient in need thereof.

[21]

[0076] A method for inhibiting the expression of APCS gene, comprising transferring a double-stranded nucleic acid into a cell using a nucleic acid conjugate according to any one of [1] to [16] or a pharmaceutical composition according to any one of [17] to [19].

[22]

[0077] A method for treating an amyloid-related disease, comprising administering a nucleic acid conjugate according to any one of [1] to [16] or a pharmaceutical composition according to any one of [17] to [19] to a mammal.

[23]

[0078] A medicament for use in the treatment of an amyloid-related disease, comprising a nucleic acid conjugate according to any one of [1] to [16] or a pharmaceutical composition according to any one of [17] to [19].

[24]

[0079] A therapeutic agent for an amyloid-related disease, comprising a nucleic acid conjugate according to any one of [1] to [16] or a pharmaceutical composition according to any one of [17] to [19].

[25]

[0080] The treatment method according to [22], wherein the amyloid-related disease is a disease caused by a disorder mediated by amyloid fibrils containing APCS.

[26]

[0081] The medicament according to [23], wherein the amyloid-related disease is a disease caused by a disorder mediated by amyloid fibrils containing APCS.

[27]

[0082] The therapeutic agent according to [24], wherein the amyloid-related disease is a disease caused by a disorder mediated by amyloid fibrils containing APCS.

### Advantageous Effects of Invention

[0083] For example, a pharmaceutical composition comprising the nucleic acid conjugate of the present invention can be administered to mammals to treat various related diseases in vivo.

### BRIEF DESCRIPTION OF DRAWING

[0084] FIG. 1 is a diagram showing changes in human APCS concentration in blood of each mouse group in Test Example 2. In the diagram, the APCS concentration of Day 0 refers to a value obtained 6 days before administration, and the date of initial administration is defined as Day 0. The abscissa depicts the number of lapsed days with the date of initial administration defined as Day 0, and the ordinate depicts the human APCS concentration (g/mL) in blood. The open circles depict a control group, and the filled triangles depict a 10 mg/kg administration group of compound 5-2. The error bars in the diagram depict standard deviation (SD).

### DESCRIPTION OF EMBODIMENTS

[0085] The nucleic acid conjugate of the present invention is a nucleic acid conjugate represented by the following formula 1:

[chemical structure]

[0086] In formula 1,

[0087] X is a double-stranded nucleic acid consisting of a sense strand and an antisense strand and comprising a duplex region of at least 11 base pairs, wherein
[0088] in the double-stranded nucleic acid, an oligonucleotide strand having a chain length of 17 to 30 nucleotides in the antisense strand is complementary to any of target APCS mRNA sequences described in Tables 1-1 to 1-13, and
[0089] the 3′ end or the 5′ end of the sense strand binds to S3,

[0090] L1 and L2 are each independently a sugar ligand, and

[0091] S1, S2 and S3 are each independently a linker.

[0092] In the present invention, S1 and S2 can each be bonded to the benzene ring at an ortho-, meta- or para-position with respect to the substitution position of S3 on the benzene ring. A nucleic acid conjugate represented by formula 1-1 given below is preferred. The bonds of S1 and S2 to the benzene ring in formula 1 mean that the bonds can be at arbitrary positions other than the substitution position of S3 on the benzene ring.

[chemical structure]

[0093] In formula 1-1,

[0094] X, L1, L2, S1, S2 and S3 are each as defined above.

[0095] In the present specification, the phrase “as defined above” means that, when formula 1-1 is taken as an example, each of X, L1, L2, S1 and S2 in formula 1-1 can be the same group as in the definition about each of X, L1, L2, S1 and S2 described above in formula 1.

[0096] In the present invention, X is a double-stranded nucleic acid consisting of a sense strand and an antisense strand and comprising a duplex region of at least 11 base pairs.

[0097] In the double-stranded nucleic acid, an oligonucleotide strand having a chain length of 17 to 30 nucleotides in the antisense strand is complementary to any of target APCS mRNA sequences described in Tables 1-1 to 1-13 mentioned later.

[0098] The 3′ end or the 5′ end of the sense strand binds to S3.

[0099] L1 and L2 are each independently a sugar ligand.

[0100] In the present invention, the sugar ligand means a group derived from a saccharide (monosaccharide, disaccharide, trisaccharide and polysaccharide, etc.) capable of binding to a receptor expressed on a target cell. In the present invention, when the sugar ligand is bonded to linker S1 or S2 through an O— bond, the sugar ligand means a group derived from a saccharide as a moiety, except for a hydroxy group, involved in the binding of the saccharide constituting the sugar ligand.

[0101] In the present invention, the sugar ligand targeted by the oligonucleotide can be selected.

[0102] Examples of the monosaccharide include allose, aldose, arabinose, cladinose, erythrose, erythrulose, fructose, D-fucitol, L-fucitol, fucosamine, fucose, fuculose, galactosamine, D-galactosaminitol, N-acetylgalactosamine, galactose, glucosamine, N-acetyl-glucosamine, glucosaminitol, glucose, glucose-6-phosphate, gulose, glyceraldehyde, L-glycero-D-manno-heptose, glycerol, glycerone, gulose, idose, lyxose, mannosamine, mannose, mannose-6-phosphate, psicose, quinovose, quinovosamine, rhamnitol, rhamnosamine, rhamnose, ribose, ribulose, sedoheptulose, sorbose, tagatose, talose, tartaric acid, threose, xylose, and xylulose.

[0103] Examples of the disaccharide, the trisaccharide, and the polysaccharide include abequose, acarbose, amicetose, amylopectin, amylose, apiose, arcanose, ascarylose, ascorbic acid, boivinose, cellobiose, cellotriose, cellulose, chacotriose, chalcose, chitin, colitose, cyclodextrin, cymarose, dextrin, 2-deoxyribose, 2-deoxyglucose, diginose, digitalose, digitoxose, evalose, evemitrose, fructo-oligosaccharide, galto-oligosaccharide, gentianose, gentiobiose, glucan, glycogen, hamamelose, heparin, inulin, isolevoglucosenone, isomaltose, isomaltotriose, isopanose, kojibiose, lactose, lactosamine, lactosediamine, laminarabiose, levoglucosan, levoglucosenone, β-maltose, maltriose, mannan-oligosaccharide, manninotriose, melicitose, melibiose, muramic acid, mycarose, mycinose, neuraminic acid, sialic acid-containing sugar chains, nigerose, nojirimycin, nobiose, oleandrose, panose, paratose, planteose, primeverose, raffinose, rhodinose, rutinose, sarmentose, sedoheptulose, sedoheptulosan, solatriose, sophorose, stachyose, streptose, sucrose, α,α-trehalose, trehalosamine, turanose, tyvelose, xylobiose, and umbelliferose.

[0104] Each monosaccharide as the saccharide may be in a D form or a L form and may be a mixture of D and L forms at an arbitrary ratio.

[0105] The saccharide may contain deoxysugar (derived by the replacement of an alcoholic hydroxy group with a hydrogen atom), aminosugar (derived by the replacement of an alcoholic hydroxy group with an amino group), thiosugar (derived by the replacement of an alcoholic hydroxy group with thiol, the replacement of C═O with C═S, or the replacement of ring oxygen with sulfur), selenosugar, tellurosugar, azasugar (derived by the replacement of ring carbon with nitrogen), iminosugar (derived by the replacement of ring oxygen with nitrogen), phosphano-sugar (derived by the replacement of ring oxygen with phosphorus), phospha-sugar (derived by the replacement of ring carbon with phosphorus), C-substituted monosaccharide (derived by the replacement of a hydrogen atom on a nonterminal carbon atom with a carbon atom), unsaturated monosaccharide, alditol (derived by the replacement of a carbonyl group with a CHOH group), aldonic acid (derived by the replacement of an aldehyde group with a carboxy group), ketoaldonic acid, uronic acid, aldaric acid, or the like.

[0106] Examples of the aminosugar which is a monosaccharide include amino monosaccharides as the saccharide, such as galactosamine, glucosamine, mannosamine, fucosamine, quinovosamine, neuraminic acid, muramic acid, lactosediamine, acosamine, bacillosamine, daunosamine, desosamine, forosamine, gallosamine, kanosamine, kansosamine, mycaminose, mycosamine, perosamine, pneumosamine, purpurosamine, and rhodosamine. The amino group of the aminosugar may be substituted with an acetyl group or the like.

[0107] Examples of the sialic acid-containing sugar chains include sugar chains containing NeuAc at their non-reducing ends and specifically include sugar chains containing NeuAc-Gal-GlcNAc, and sugar chains containing Neu5Acα(2-6)Galβ (1-3)GlcNAc.

[0108] Each monosaccharide as the saccharide may be substituted with a substituent as long as the monosaccharide is capable of binding to a receptor expressed on a target cell. For example, the monosaccharide may be substituted with a hydroxy group, or one or more hydrogen atoms in each monosaccharide may be replaced with azide and/or an optionally substituted aryl group.

[0109] The sugar ligand is preferably selected as a sugar ligand binding to a receptor expressed on the surface of a target cell according to each targeted organ. When the target cell is, for example, a liver cell, the sugar ligand is preferably a sugar ligand against a receptor expressed on the surface of the liver cell, more preferably a sugar ligand against an asialoglycoprotein receptor (ASGPR).

[0110] The sugar ligand against ASGPR is preferably mannose or N-acetylgalactosamine, more preferably N-acetylgalactosamine.

[0111] For example, sugar derivatives described in Bioorganic Medicinal Chemistry, 17, 7254 (2009), and Journal of American Chemical Society, 134, 1978 (2012) are known as sugar ligands having higher affinity for ASGPR, and these sugar derivatives may be used.

[0112] In the present invention, each of S1, S2 and S3 is a linker.

[0113] S1 and S2 are not particularly limited as long as their structures link sugar ligands L1 and L2 to the benzene ring. A structure known in the art for use in nucleic acid conjugates may be adopted. S1 and S2 may be the same or may be different.

[0114] Sugar ligands L1 and L2 are preferably linked to S1 and S2 through glycoside bonds. S1 and S2 may each be linked to the benzene ring, for example, through a —CO—, —NH—, —O—, —S—, —O—CO—, —S—CO—, —NH—CO—, —CO—O—, —CO—S— or —CO—NH— bond.

[0115] S3 is not particularly limited as long as its structure links double-stranded nucleic acid X to the benzene ring. A structure known in the art for use in nucleic acid conjugates may be adopted.

[0116] Oligonucleotide X is preferably linked to S3 through a phosphodiester bond. S3 may be linked to the benzene ring, for example, through a —CO—, —NH—, —O—, —S—, —O—CO—, —S—CO—, —NH—CO—, —CO—O—, —CO—S— or —CO—NH— bond.

[0117] For example, structures disclosed in International Publication Nos. WO 2009/073809, WO 2013/075035, WO 2015/105083, WO 2014/179620, and WO 2015/006740 may be adopted as linkers S1, S2 and S3.

[0118] In the present invention, the nucleic acid conjugate is preferably a nucleic acid conjugate having a structure represented by the following formula 2:

[chemical structure]

[0119] In formula 2,

[0120] X, L1, L2 and S3 are each as defined above,

[0121] P1, P2, P3, P4, P5 and P6, and T1 and T2 are each independently absent, or —CO—, —NH—, —O—, —S—, —O—CO—, —S—CO—, —NH—CO—, —CO—O—, —CO—S— or —CO—NH—, and

[0122] Q1, Q2, Q3 and Q4 are each independently absent, or substituted or unsubstituted alkylene having 1 to 12 carbon atoms or —(CH₂CH₂O)ₙ—CH₂CH₂— wherein n is an integer of 0 to 99.

[0123] P1 and P4 are each independently absent, or —CO—, —NH—, —O—, —S—, —O—CO—, —S—CO—, —NH—CO—, —CO—O—, —CO—S— or —CO—NH— and are each preferably —O—, —O—CO—, —NH—CO— or —CO—NH—, more preferably —O—, —NH—CO— or —CO—NH—, further preferably —NH—CO—.

[0124] When P1 or P4 is, for example, —NH—CO—, a substructure —NH—CO-benzene ring is present.

[0125] Q1, Q2, Q3 and Q4 are each independently absent, or substituted or unsubstituted alkylene having 1 to 12 carbon atoms or —(CH₂CH₂O)ₙ—CH₂CH₂— wherein n is an integer of 0 to 99, and are each preferably substituted or unsubstituted alkylene having 1 to 12 carbon atoms, more preferably unsubstituted alkylene having 1 to 12 carbon atoms, further preferably unsubstituted alkylene having 1 to 6 carbon atoms, still further preferably unsubstituted alkylene having 1 to 4 carbon atoms.

[0126] P2 and P5 are each independently absent, or —CO—, —NH—, —O—, —S—, —O—CO—, —S—CO—, —NH—CO—, —CO—O—, —CO—S— or —CO—NH— and are each preferably absent, —CO—O— or —CO—NH—, more preferably absent or —CO—NH—. When each of P2 and P5 is, for example, —CO—NH—, substructures B1-CO—NH-Q1 and B2-CO—NH-Q3 are present.

[0127] -[P2-Q1]_{q1}- and -[P5-Q3]_{q3}- are each independently preferably absent, or any structure represented by the following formulas 3-1 to 3-3:

[chemical structure]

[0128] In formulas 3-1 to 3-3,

[0129] m5 and m6 are each independently an integer of 0 to 10, and each of the terminal dots in the structures of formulas 3-1 to 3-3 is a binding site to B1 or B2, or P1 or P4.

[0130] B1 and B2 are each independently a bond, or any structure represented by the following formulas, wherein each of the terminal dots in each structure is a binding site to P2 or P3, or P5 or P6, and m1, m2, m3 and m4 are each independently an integer of 0 to 10:

[chemical structure]

[0131] Each of B1 and B2 is preferably a group derived from an amino acid such as glutamic acid, aspartic acid, lysine, including non-natural amino acids such as iminodiacetic acid, or an amino alcohol such as 2-amino-1,3-propanediol. When B1 and B2 are groups derived from glutamic acid or aspartic acid, it is preferred that the amino group of each glutamic acid or aspartic acid should be bonded while P2 and P5 should be —NH—CO— bonds. When B1 and B2 are groups derived from lysine, it is preferred that the carboxyl group of each lysine should be bonded while P2 and P5 should be —CO—NH— bonds. When B1 and B2 are groups derived from iminodiacetic acid, it is preferred that the amino group of each iminodiacetic acid should be bonded while P2 and P5 should be —CO— bonds. Specifically, each of B1 and B2 preferably has any of the following structures:

[chemical structure]

[0132] When each of p1 and p2 is an integer of 2 or 3, each P3 and P6, Q2 and Q4, T1 and T2 or L1 and L2 are the same or different.

[0133] When q1 to q4 are 2 to 10, combinations -[P2-Q1]-, -[Q2-P3]—, -[P5-Q3]- or -[Q4-P6]- are the same or different. The same or different combinations -[P2-Q1]-, -[Q2-P3]—, -[P5-Q3]- or -[Q4-P6]- mean that 2 to 10 units each of -[P2-Q1]-, -[Q2-P3]—, -[P5-Q3]-, and -[Q4-P6]- may be the same or may be different.

[0134] In the present invention, the nucleic acid conjugate is preferably a nucleic acid conjugate having any structure represented by the following formulas 4-1 to 4-9:

[chemical structure]

[chemical structure]

[chemical structure]

[0135] In formulas 4-1 to 4-9,

[0136] X, L1, L2, S3, P3, P6, T1, T2, Q2, Q4, q2 and q4 are each as defined above.

[0137] P3 and P6 are each independently absent, or —CO—, —NH—, —O—, —S—, —O—CO—, —S—CO—, —NH—CO—, —CO—O—, —CO—S— or —CO—NH— and are each preferably —O—CO— or —NH—CO—, more preferably —NH—CO—. When each of P3 and P6 is, for example, —NH—CO—, substructures B1-NH—CO-Q2 and B2-NH—CO-Q4 are present.

[0138] T1 and T2 are each independently absent, or —CO—, —NH—, —O—, —S—, —O—CO—, —S—CO—, —NH—CO—, —CO—O—, —CO—S— or —CO—NH— and are each preferably —O— or —S—, more preferably —O—.

[0139] In the present invention, the nucleic acid conjugate is preferably a nucleic acid conjugate having a structure represented by formula 5 given below.

[0140] In formula 5, P1 and P4 in formula 2 are the same; P2 and P5 in formula 2 are the same; P3 and P6 in formula 2 are the same; Q1 and Q3 in formula 2 are the same; Q2 and Q4 in formula 2 are the same; B1 and B2 in formula 2 are the same; T1 and T2 in formula 2 are the same; L1 and L2 in formula 2 are the same; p1 and p2 in formula 2 are the same; q1 and q3 in formula 2 are the same; and q2 and q4 in formula 2 are the same.

[chemical structure]

[0141] In formula 5,

[0142] X, S3, P1, P2, P3, Q1, Q2, B1, T1, L1, p1, q1 and q2 are each as defined above.

[0143] X, S3, P1, P2, P3, Q1, Q2, B1, T1, L1, p1, q1 and q2 in formula 5 can each be any of the preferred groups mentioned above. P1 is preferably —CO—NH—, —NH—CO— or —O—.

[0144] -(P2-Q1)_{q1}- in formula 5 is preferably absent, or any structure represented by formulas 3-1 to 3-3 described above.

[0145] In the present invention, the nucleic acid conjugate is preferably a nucleic acid conjugate having any structure represented by the following formulas 6-1 to 6-9:

[chemical structure]

[chemical structure]

[chemical structure]

[0146] In formulas 6-1 to 6-9,

[0147] X, S3, P3, Q2, T1, L1 and q2 are each as defined above.

[0148] In the present invention, the nucleic acid conjugate is preferably a nucleic acid conjugate having any structure represented by the following formulas 7-1 to 7-9:

[chemical structure]

[chemical structure]

[chemical structure]

[0149] In formulas 7-1 to 7-9,

[0150] X, L1, L2 and S3 are each as defined above. L1 and L2 may be the same or may be different and is preferably the same.

[0151] A nucleic acid derivative other than the nucleic acid conjugate having any structure represented by formulas 7-1 to 7-9 can also be produced by introducing alkylene chains differing in chain length as each alkylene group moiety in formulas 7-1 to 7-9, or by replacing an amide bond or the like with another bond.

[0152] In the present invention, the nucleic acid conjugate is preferably a nucleic acid conjugate having a structure represented by the following formula 11:

[chemical structure]

[0153] In formula 11,

[0154] L1, L2, S1 S2 and X are each as defined above,

[0155] P7 and P8 are each independently absent, or —CO—, —NH—, —O—, —S—, —O—CO—, —S—CO—, —NH—CO—, —CO—O—, —CO—S— or —CO—NH—,

[0156] Q5, Q6 and Q7 are each independently absent, or substituted or unsubstituted alkylene having 1 to 12 carbon atoms or —(CH₂CH₂O)ₙ₈—CH₂CH₂— wherein n8 is an integer of 0 to 99,

[0157] B3, which is referred to as a brancher unit in the present specification, is any structure represented by the following formula 11-1, wherein the broken lines respectively mean bonds to Q5 and Q6.

[chemical structure]

[chemical structure]

[0158] In formula 11-1, substitution in a group having a triazole ring occurs at any of nitrogen atoms at positions 1 and 3 of the triazole ring.

[0159] q5 and q6 are each independently an integer of 0 to 10.

[0160] P7 is absent, or —CO—, —NH—, —O—, —S—, —O—CO—, —S—CO—, —NH—CO—, —CO—O—, —CO—S— or —CO—NH— and is preferably —O—, —NH—CO— or —CO—NH—, more preferably —O— or —NH—CO—. When P7 is, for example, —O—, a substructure benzene ring-O— is present.

[0161] P8 is absent, or —CO—, —NH—, —O—, —S—, —O—CO—, —S—CO—, —NH—CO—, —CO—O—, —CO—S— or —CO—NH—. When P8 is present, P8 is preferably —CO—O— or —CO—NH—, more preferably —CO—NH—. When P8 is, for example, —CO—NH—, a substructure Q6-CO—NH— is present.

[0162] Q5, Q6 and Q7 are each independently absent, or substituted or unsubstituted alkylene having 1 to 12 carbon atoms or —(CH₂CH₂O)ₙ₈—CH₂CH₂— wherein n8 is an integer of 0 to 99, and are each preferably substituted or unsubstituted alkylene having 1 to 12 carbon atoms, more preferably unsubstituted alkylene having 1 to 12 carbon atoms, further preferably unsubstituted alkylene having 1 to 6 carbon atoms, still further preferably unsubstituted alkylene having 1 to 4 carbon atoms.

[0163] Preferably, -(P7-Q5)_{q5}- is —O—(CH₂)ₙ₁₅—NH— or —NH—CO—(CH₂)ₙ₁₆—NH—, and m15 and m16 are each independently an integer of 1 to 10.

[0164] In the present invention, the nucleic acid conjugate is preferably a nucleic acid conjugate having any structure represented by the following formulas 12-1 to 12-12:

[chemical structure]

[chemical structure]

[chemical structure]

[0165] In formulas 12-1 to 12-12,

[0166] X, L1, L2, S1 and S2 are each as defined above, and n1′ to n12′ are each independently an integer of 1 to 10.

[0167] The nucleic acid conjugate of the present invention is preferably a nucleic acid conjugate having a structure represented by formula 2 corresponding to S1 and S2 and a structure represented by formula 11 corresponding to S3 in combination in the nucleic acid conjugate represented by formula 1. Formula 2 may be any of formula 4-1 to formula 4-9, may be any of formula 6-1 to formula 6-9, or may be any of formula 7-1 to formula 7-9. When formula 2 is any of formula 4-1 to formula 4-9, formula 6-1 to formula 6-9, or formula 7-1 to formula 7-9, formula 11 may be any of formula 12-1 to formula 12-12. The nucleic acid conjugate of the present invention is more preferably a nucleic acid conjugate having any one structure represented by formula 4-1 to formula 4-9 corresponding to S1 and S2, and any one structure represented by formula 12-1 to formula 12-12 corresponding to S3 in combination, a nucleic acid conjugate having any one structure represented by formula 6-1 to formula 6-9 corresponding to S1 and S2, and any one structure represented by formula 12-1 to formula 12-12 corresponding to S3 in combination, a nucleic acid conjugate having any one structure represented by formula 7-1 to formula 7-9 corresponding to S1 and S2, and any one structure represented by formula 12-1 to formula 12-12 corresponding to S3 in combination in the nucleic acid conjugate represented by formula 1.

[0168] The nucleic acid conjugate of the present invention is preferably represented by the following formula 7-8-1:

[chemical structure]

wherein X is as defined above.

[0169] X in formula 1 is a double-stranded nucleic acid consisting of a sense strand and an antisense strand and comprising a duplex region of at least 11 base pairs. In the double-stranded nucleic acid, an oligonucleotide strand having a chain length of 17 to 30 nucleotides in the antisense strand is complementary to any of target APCS mRNA sequences described in Tables 1-1 to 1-13. The 3′ end or the 5′ end of the sense strand binds to S3. Therefore, in formula 1, X binding to S3 is the sense strand constituting the double-stranded nucleic acid and is a sense strand represented by any of sense strand sequences in Tables 1-1 to 1-13, M1-1 to M1-3 and R-1 to R-2 mentioned later.

[0170] In the present invention, a nucleic acid comprising a nucleotide sequence complementary to APCS mRNA is also referred to as an antisense strand nucleic acid, and a nucleic acid comprising a nucleotide sequence complementary to the nucleotide sequence of the antisense strand nucleic acid is also referred to as a sense strand nucleic acid.

[0171] The double-stranded nucleic acid constituting the nucleic acid conjugate of the present invention is a double-stranded nucleic acid having the ability to decrease or arrest the expression of APCS gene when transferred to mammalian cells, and is a double-stranded nucleic acid having a sense strand and an antisense strand. The sense strand and the antisense strand have at least 11 base pairs. An oligonucleotide strand having a chain length of at least 17 nucleotides and at most 30 nucleotides, i.e., 17 to 30 nucleotides, in the antisense strand is complementary to a target APCS mRNA sequence selected from a group described in Tables 1-1 to 1-13.

[0172] The double-stranded nucleic acid constituting the nucleic acid conjugate of the present invention can be any double-stranded nucleic acid which is a polymer of nucleotides or molecules functionally equivalent to nucleotides. Examples of such a polymer include RNA which is a polymer of ribonucleotides, DNA which is a polymer of deoxyribonucleotides, a chimeric nucleic acid consisting of RNA and DNA, and a nucleotide polymer derived from any of these nucleic acids by the replacement of at least one nucleotide with a molecule functionally equivalent to the nucleotide. A derivative of any of these nucleic acids containing at least one molecule functionally equivalent to the nucleotide is also included in the double-stranded nucleic acid as a drug used in the present invention. Uracil (U) and thymine (T) in DNA can be used interchangeably with each other.

[0173] Examples of the molecules functionally equivalent to nucleotides include nucleotide derivatives. The nucleotide derivative may be any molecule as long as the molecule is prepared by modifying a nucleotide. For example, a modified ribonucleotide or deoxyribonucleotide molecule is suitably used for improving or stabilizing nuclease resistance, for enhancing affinity for a complementary strand nucleic acid, for enhancing cell permeability, or for visualizing the molecule, as compared with RNA or DNA.

[0174] Examples of the molecule prepared by modifying a nucleotide include nucleotides modified at the sugar moiety, nucleotides modified at the phosphodiester bond, nucleotides modified at the base, and nucleotides modified at at least one of a sugar moiety, a phosphodiester bond and a base.

[0175] The nucleotide modified at the sugar moiety can be any nucleotide in which a portion or the whole of the chemical structure of its sugar is modified or substituted with an arbitrary substituent or substituted with an arbitrary atom. A 2′-modified nucleotide is preferably used.

[0176] The 2′-modified nucleotide is a nucleotide in which the 2′-OH group of ribose is substituted with a substituent selected from the group consisting of H, OR, R, R′OR, SH, SR, NH₂, NHR, NR₂, N₃, CN, F, Cl, Br and I (R is alkyl or aryl, preferably alkyl having 1 to 6 carbon atoms, and R′ is alkylene, preferably alkylene having 1 to 6 carbon atoms), more preferably a nucleotide in which the 2′-OH group is substituted with H, F or a methoxy group, further preferably a nucleotide in which the 2′-OH group is substituted with F or a methoxy group. Further examples thereof include nucleotides in which the 2′-OH group is substituted with a substituent selected from the group consisting of a 2-(methoxy)ethoxy group, a 3-aminopropoxy group, a 2-[(N,N-dimethylamino)oxy]ethoxy group, a 3-(N,N-dimethylamino)propoxy group, a 2-[2-(N,N-dimethylamino)ethoxy]ethoxy group, a 2-(methylamino)-2-oxoethoxy group, a 2-(N-methylcarbamoyl)ethoxy group and a 2-cyanoethoxy group.

[0177] The double-stranded nucleic acid preferably contains 50 to 100%, more preferably 70 to 100%, further preferably 90 to 100%, of the 2′-modified nucleotide with respect to the nucleotides within the double-stranded nucleic acid region. The sense strand preferably contains 20 to 100%, more preferably 40 to 100%, further preferably 60 to 100%, of the 2′-modified nucleotide with respect to the nucleotides of the sense strand. The antisense strand preferably contains 20 to 100%, more preferably 40 to 100%, further preferably 60 to 100%, of the 2′-modified nucleotide with respect to the nucleotides of the antisense strand.

[0178] The nucleotide modified at the phosphodiester bond can be any nucleotide in which a portion or the whole of the chemical structure of its phosphodiester bond is modified or substituted with an arbitrary substituent or substituted with an arbitrary atom. Examples thereof include a nucleotide resulting from the substitution of the phosphodiester bond with a phosphorothioate bond, a nucleotide resulting from the substitution of the phosphodiester bond with a phosphorodithioate bond, a nucleotide resulting from the substitution of the phosphodiester bond with an alkyl phosphonate bond, and a nucleotide resulting from the substitution of the phosphodiester bond with a phosphoramidate bond.

[0179] The nucleotide modified at the base can be any nucleotide in which a portion or the whole of the chemical structure of its base is modified or substituted with an arbitrary substituent or substituted with an arbitrary atom. Examples thereof include a nucleotide resulting from the substitution of an oxygen atom in the base with a sulfur atom, a nucleotide resulting from the substitution of a hydrogen atom with an alkyl group having 1 to 6 carbon atoms, halogen, or the like, a nucleotide resulting from the substitution of a methyl group with hydrogen, hydroxymethyl, an alkyl group having 2 to 6 carbon atoms, or the like, and a nucleotide resulting from the substitution of an amino group with an alkyl group having 1 to 6 carbon atoms, an alkanoyl group having 1 to 6 carbon atoms, an oxo group, a hydroxy group, or the like.

[0180] Examples of the nucleotide derivatives also include nucleotides or nucleotides modified at at least one of a sugar moiety, a phosphodiester bond and a base which contain an additional chemical substance, such as peptide, protein, sugar, lipid, phospholipid, phenazine, folate, phenanthridine, anthraquinone, acridine, fluorescein, rhodamine, coumarin, or a dye, added thereto directly or via a linker, and specifically include 5′-polyamine-added nucleotide derivatives, cholesterol-added nucleotide derivatives, steroid-added nucleotide derivatives, bile acid-added nucleotide derivatives, vitamin-added nucleotide derivatives, Cy5-added nucleotide derivatives, Cy3-added nucleotide derivatives, 6-FAM-added nucleotide derivatives, and biotin-added nucleotide derivatives.

[0181] The nucleotide derivative may form a bridged structure, such as an alkylene structure, a peptide structure, a nucleotide structure, an ether structure, an ester structure, and a structure combined with at least one of these structures, with another nucleotide or nucleotide derivative within the nucleic acid.

[0182] In the present specification, the term “complementation” means a relationship capable of forming a base pair between two bases and refers to the formation of a double helix structure as the whole duplex region via a mild hydrogen bond, for example, the relationship between adenine and thymine or uracil, and the relationship between guanine and cytosine.

[0183] In the present specification, the term “complementary” not only means the case where two nucleotide sequences are completely complementary to each other, but means that 0 to 30%, 0 to 20% or 0 to 10% of a mismatch base can be present between the nucleotide sequences, and, for example, an antisense strand complementary to APCS mRNA may contain the substitution of one or more bases in its nucleotide sequence completely complementary to a partial nucleotide sequence of the mRNA. Specifically, the antisense strand may have 1 to 8, preferably 1 to 6, 1 to 4 or 1 to 3, particularly, 2 or 1 mismatch bases for a target sequence of a target gene. For example, when the antisense strand is 21 bases long, the antisense strand may have 6, 5, 4, 3, 2 or 1 mismatch bases for a target sequence of a target gene. The position of the mismatch may be the 5′ end or the 3′ end of each sequence.

[0184] Also, the term “complementary” is meant to encompass the case where two nucleotide sequences, one of which is completely complementary to the other nucleotide sequence, have the addition and/or deletion of one or more bases. For example, APCS mRNA and the antisense strand nucleic acid of the present invention may have 1 or 2 bulge bases in the antisense strand and/or target APCS mRNA region by the addition and/or deletion of base(s) in the antisense strand.

[0185] The double-stranded nucleic acid as a drug used in the present invention may be constituted by any nucleotide or derivative thereof as long as the nucleotide or the derivative is a nucleic acid comprising a nucleotide sequence complementary to a partial nucleotide sequence of APCS mRNA and/or a nucleic acid comprising a nucleotide sequence complementary to the nucleotide sequence of the nucleic acid. The double-stranded nucleic acid of the present invention can have any length as long as the nucleic acid comprising a nucleotide sequence complementary to the target APCS mRNA sequence and the nucleic acid comprising a nucleotide sequence complementary to the nucleotide sequence of the nucleic acid can form a duplex of at least 11 base pairs. The sequence length that allows formation of the duplex is usually 11 to 27 bases, preferably 15 to 25 bases, more preferably 17 to 23 bases, further preferably 19 to 23 bases.

[0186] A nucleic acid comprising a nucleotide sequence complementary to the target APCS mRNA sequence is used as the antisense strand of the nucleic acid conjugate of the present invention. A nucleic acid derived from the nucleic acid by the deletion, substitution or addition of 1 to 3 bases, preferably 1 to 2 bases, more preferably 1 base, may be used.

[0187] A single-stranded nucleic acid that consists of a nucleic acid comprising a nucleotide sequence complementary to the target APCS mRNA sequence and inhibits the expression of APCS, or a double-stranded nucleic acid that consists of a nucleic acid comprising a nucleotide sequence complementary to the target APCS mRNA sequence and a nucleic acid comprising a nucleotide sequence complementary to the nucleotide sequence of the nucleic acid and inhibits the expression of APCS is suitably used as a nucleic acid inhibiting the expression of APCS.

[0188] The antisense strand nucleic acid and the sense strand nucleic acid constituting the double-stranded nucleic acid are the same or different and each usually consist of 11 to 30 bases, and are the same or different and each preferably consist of 17 to 27 bases, more preferably 17 to 25 bases, further preferably 19 to 25 bases, still further preferably 21 or 23 bases.

[0189] The double-stranded nucleic acid used as a drug in the present invention may have a non-duplex-forming additional nucleotide or nucleotide derivative on the 3′ or 5′ side subsequent to the duplex region. This non-duplex-forming moiety is referred to as an overhang. When the double-stranded nucleic acid has an overhang, the nucleotide constituting the overhang may be a ribonucleotide, a deoxyribonucleotide or a derivative thereof.

[0190] A double-stranded nucleic acid having an overhang consisting of 1 to 6 bases, usually 1 to 3 bases, at the 3′ or 5′ end of at least one of the strands is used as the double-stranded nucleic acid having the overhang. A double-stranded nucleic acid having an overhang consisting of 2 bases is preferably used. Examples thereof include double-stranded nucleic acids having an overhang consisting of dTdT (dT represents deoxythymidine) or UU (U represents uridine). The overhang can be present in only the antisense strand, only the sense strand, and both the antisense strand and the sense strand. In the present invention, a double-stranded nucleic acid having an overhang in the antisense strand is preferably used. In the antisense strand, an oligonucleotide strand consisting of 17 to 30 nucleotides comprising the duplex region and the overhang subsequent thereto is sufficiently complementary to a target APCS mRNA sequence selected from a group described in Tables 1-1 to 1-13. Alternatively, for example, a nucleic acid molecule that forms a double-stranded nucleic acid by the action of ribonuclease such as Dicer (WO2005/089287), a double-stranded nucleic acid having blunt ends formed without having 3′ terminal and 5′ terminal overhangs, or a double-stranded nucleic acid having a protruding sense strand (US2012/0040459) may be used as the double-stranded nucleic acid of the present invention.

[0191] A nucleic acid consisting of a sequence identical to the nucleotide sequence of a target gene or the nucleotide sequence of its complementary strand may be used in the double-stranded nucleic acid constituting the nucleic acid conjugate of the present invention. A double-stranded nucleic acid consisting of a nucleic acid derived from the nucleic acid by the truncation of 1 to 4 bases from the 5′ or 3′ end of at least one strand, and a nucleic acid comprising a nucleotide sequence complementary to the nucleotide sequence of the nucleic acid may be used.

[0192] The double-stranded nucleic acid constituting the nucleic acid conjugate of the present invention may be double-stranded RNA (dsRNA) comprising a RNA duplex, double-stranded DNA (dsDNA) comprising a DNA duplex, or a hybrid nucleic acid comprising a RNA-DNA duplex. Alternatively, the double-stranded nucleic acid may be a chimeric nucleic acid having two strands, one or both of which consists of DNA and RNA. Double-stranded RNA (dsRNA) is preferred.

[0193] Preferably, the 2nd nucleotide counted from the 5′ end of the antisense strand of the nucleic acid conjugate of the present invention is complementary to the 2nd deoxyribonucleotide counted from the 3′ end of the target APCS mRNA sequence. More preferably, the 2nd to 7th nucleotides counted from the 5′ end of the antisense strand are completely complementary to the 2nd to 7th deoxyribonucleotides counted from the 3′ end of the target APCS mRNA sequence. Further preferably, the 2nd to 11th nucleotides counted from the 5′ end of the antisense strand are completely complementary to the 2nd to 11th deoxyribonucleotides counted from the 3′ end of the target APCS mRNA sequence. Also preferably, the 11th nucleotide counted from the 5′ end of the antisense strand in the nucleic acid of the present invention is complementary to the 11th deoxyribonucleotide counted from the 3′ end of the target APCS mRNA sequence. More preferably, the 9th to 13th nucleotides counted from the 5′ end of the antisense strand are completely complementary to the 9th to 13th deoxyribonucleotides counted from the 3′ end of the target APCS mRNA sequence. Further preferably, the 7th to 15th nucleotides counted from the 5′ end of the antisense strand are completely complementary to the 7th to 15th deoxyribonucleotides counted from the 3′ end of the target APCS mRNA sequence.

[0194] The antisense strand and the sense strand of the nucleic acid conjugate of the present invention can be designed on the basis of, for example, the nucleotide sequence (SEQ ID NO: 1) of cDNA (sense strand) of full-length mRNA of human APCS registered under GenBank Accession No. NM_001639.3.

[0195] The double-stranded nucleic acid can be designed so as to interact with a target sequence within the APCS gene sequence.

[0196] The sequence of one strand of the double-stranded nucleic acid is complementary to the sequence of the target site described above. The double-stranded nucleic acid can be chemically synthesized by use of a method described in the present specification.

[0197] RNA may be produced enzymatically or by partial or total organic synthesis. A modified ribonucleotide can be introduced enzymatically or by organic synthesis in vitro. In one aspect, each strand is chemically prepared. A method for chemically synthesizing a RNA molecule is known in the art [see Nucleic Acids Research, 1998, Vol. 32, p. 936-948]. In general, the double-stranded nucleic acid can be synthesized by use of a solid-phase oligonucleotide synthesis method (see, for example, Usman et al., U.S. Pat. Nos. 5,804,683; 5,831,071; 5,998,203; 6,117,657; 6,353,098; 6,362,323; 6,437,117; and 6,469,158; Scaringe et al., U.S. Pat. Nos. 6,111,086; 6,008,400; and 6,111,086).

[0198] The single-stranded nucleic acid is synthesized by use of a solid-phase phosphoramidite method [see Nucleic Acids Research, 1993, Vol. 30, p. 2435-2443], deprotected, and desalted on NAP-5 column (Amersham Pharmacia Biotech Ltd., Piscataway, N.J.). The oligomer is purified by ion-exchange high-performance liquid chromatography (IE-HPLC) on Amersham Source 15Q column (1.0 cm, height: 25 cm; Amersham Pharmacia Biotech Ltd., Piscataway, N.J.) using a linear gradient in a 15-minute step. The gradient shifts from buffer solution A:B of 90:10 to buffer solution A:B of 52:48. The buffer solution A is 100 mmol/L Tris, pH 8.5, and the buffer solution B is 100 mmol/L Tris, pH 8.5 (1 mol/L NaCl). A sample is monitored at 260 nm, and a peak corresponding to full-length oligonucleotide species is collected, pooled, desalted on NAP-5 column, and freeze-dried.

[0199] The purity of each single-stranded nucleic acid is determined by capillary electrophoresis (CE) using Beckman PACE 5000 (Beckman Coulter, Inc., Fullerton, Calif.). The CE capillary has an inside diameter of 100 m and contains ssDNA 100R Gel (Beckman-Coulter, Inc.). Typically, approximately 0.6 nmole of the oligonucleotide is injected to the capillary, and CE is carried out in an electric field of 444 V/cm, followed by the detection of UV absorbance at 260 nm. An electrophoresis buffer solution containing modified Tris-borate and 7 mol/L urea is purchased from Beckman Coulter, Inc. A single-stranded nucleic acid having at least 90% purity evaluated by CE is obtained for use in an experiment mentioned below. Compound identity is verified by matrix-assisted laser desorption/ionization time of flight (MALDI-TOF) mass spectrometry using Voyager DE™ Biospectometry workstation (Applied Biosystems, Inc., Foster City, Calif.) according to manufacturer's recommended protocol. The relative molecular mass of the single-stranded nucleic acid can be obtained within 0.2% of a predicted molecular mass.

[0200] The single-stranded nucleic acid is resuspended at a concentration of 100 μmol/L in a buffer solution consisting of 100 mmol/L potassium acetate and 30 mmol/L HEPES, pH 7.5. The complementary sense strand and the antisense strand are mixed in equimolar amounts to obtain a final solution of 50 μmol/L double-stranded nucleic acid. The sample is heated to 95° C. for 5 minutes and cooled to room temperature before use. The double-stranded nucleic acid is preserved at −20° C. The single-stranded nucleic acid is freeze-dried or stored at −80° C. in nuclease-free water.

[0201] A double-stranded nucleic acid comprising a sequence selected from the group consisting of antisense strands described in Tables M1-1 to M1-3, R-3, R-4 and 1-1 to 1-13, a double-stranded nucleic acid comprising a sequence selected from the group consisting of sense strands described in Tables M1-1 to M1-3, R-1, R-2 and 1-1 to 1-13 mentioned later, or double-stranded nucleic acid comprising the sequences of a pair of sense strand/antisense strand selected from the group consisting of sense strands/antisense strands described in Tables M1-1 to M1-3, R-1 to R-4 and 1-1 to 1-13 can be used as the double-stranded nucleic acid according to the present invention consisting of a sense strand and an antisense strand and comprising a duplex region of at least 11 base pairs, wherein an oligonucleotide strand having a chain length of 11 to 30 nucleotides in the antisense strand is complementary to a target APCS mRNA sequence selected from a group described in Tables 1-1 to 1-13 mentioned later.

[0202] A specific example of the double-stranded nucleic acid constituting the nucleic acid conjugate used in the present invention is a double-stranded nucleic acid consisting of any sense strand and antisense strand in Tables M1-1 to M1-3, R-1 to R-4 and 1-1 to 1-13. In Tables M1-1 to M1-3 and R-1 to R-4, N(M) represents 2′-O-methyl-modified RNA; N(F) represents 2′-fluorine-modified RNA; and \hat{ } represents phosphorothioate. The 5′ terminal nucleotides of antisense strand sequences described in Tables 1-1 to 1-13, M1-1 to M1-3, R-3 and R-4 may or may not be phosphorylated and are preferably phosphorylated.

[0203] The double-stranded nucleic acid comprising the sequences of any sense strand/antisense strand described in Tables 1-1 to 1-13 attains a relative APCS expression level of preferably 0.50 or less, more preferably 0.30 or less, further preferably 0.20 or less, most preferably 0.10 or less, as compared with conditions that are not supplemented with the double-stranded nucleic acid in the measurement of knockdown activity when added at 1 nM.

[0204] The oligonucleotide according to the present invention can be any double-stranded nucleic acid comprising a 2′-modified nucleotide and is preferably any of those described in Tables M1 to M3. The double-stranded nucleic acid attains a relative APCS expression level of more preferably 0.10 or less as compared with conditions that are not supplemented with the double-stranded nucleic acid in the measurement of knockdown activity when added at 1 nM.

[0205] A nucleic acid conjugate of any of the preferred double-stranded nucleic acids combined with a ligand linker known in the art is also included in the present invention. Examples of the ligand linker known in the art include those disclosed in International Publication Nos. WO 2009/073809 and WO 2013/075035.

[0206] The nucleic acid conjugate of the present invention is preferably any nucleic acid conjugate described in Table S1 (compounds 1-2 to 43-2) and is more preferably a nucleic acid conjugate that attains a relative APCS expression level of more preferably 0.50 or less as compared with a negative control that is not supplemented with the nucleic acid conjugate in the measurement of knockdown activity when added at a final concentration of 3 nM. Specific examples of the nucleic acid conjugate include compounds 1-2, 5-2, 9-2, 10-2, 15-2, 20-2, 33-2 and 35-2.

[0207] A method for producing the nucleic acid conjugate of the present invention will be described. In the production methods given below, if defined groups react under conditions of the production methods or are unsuitable for carrying out the production methods, the compounds of interest can be produced by use of methods for introducing and removing protective groups commonly used in organic synthetic chemistry [e.g., methods described in Protective Groups in Organic Synthesis, third edition, T. W. Greene, John Wiley & Sons Inc. (1999)] or the like. If necessary, the order of reaction steps including substituent introduction and the like may be changed.

[0208] The nucleic acid conjugate represented by formula 1 can also be synthesized by solid-phase synthesis.

[0209] The nucleic acid conjugate represented by formula 1 can be synthesized with reference to a method for synthesizing a linker structure known in the art for nucleic acid conjugates.

[0210] The synthesis of a L1-benzene ring unit having linker S1 or a L2-benzene ring unit having linker S2 in the nucleic acid conjugate represented by formula 1 will be described by taking the nucleic acid conjugate represented by formula 2 as an example.

[0211] The L1-benzene ring unit and the L2-benzene ring unit in the nucleic acid conjugate represented by formula 2 has linkages by P1, P2, P3, P4, P5, and P6, and T1 and T2.

[0212] The —CO—, —NH—, —O—, —S—, —O—CO—, —S—CO—, —NH—CO—, —CO—O—, —CO—S— or —CO—NH— bond represented by P1, P2, P3, P4, P5, and P6, and T1 and T2 can be appropriately synthesized by selecting a starting material suitable for forming the structure represented by formula 2 with reference to methods for binding reaction described in, for example, The Fourth Series of Experimental Chemistry 19, “Synthesis of Organic Compound I”, Maruzen Co., Ltd. (1992) and The Fourth Series of Experimental Chemistry 20, “Synthesis of Organic Compound II”, Maruzen Co., Ltd. (1992).

[0213] A substructure of the L1-benzene ring unit can be produced by sequentially bonding a compound having Q1 as a substructure and a compound having B1 as a substructure to the benzene ring.

[0214] The L1-benzene ring unit structure can be produced by separately synthesizing a compound having L1 and Q2 as a substructure, and bonding the compound having L1 and Q2 as a substructure to a compound having a substructure of a L1-benzene ring unit having the benzene ring, Q1 and B1 as a substructure.

[0215] Likewise, a substructure of the L2-benzene ring unit can be produced by sequentially bonding a compound having Q3 as a substructure and a compound having B2 as a substructure to the benzene ring.

[0216] The L2-benzene ring unit structure can be produced by separately synthesizing a compound having L2 and Q4 as a substructure, and bonding the compound having L2 and Q4 as a substructure to a compound having a substructure of a L2-benzene ring unit having the benzene ring, Q3 and B2 as a substructure.

[0217] Examples of the compound having Q1 as a substructure and the compound having Q3 as a substructure include compounds having a hydroxy group, a carboxyl group, an amino group, and/or a thiol group at both ends of alkylene having 1 to 10 carbon atoms or —(CH₂CH₂O)ₙ—CH₂CH₂—.

[0218] Examples of the compound having B1 as a substructure and the compound having B2 as a substructure include compounds having any structure represented by the following formula 2-1 and having a hydroxy group, a carboxyl group, an amino group, or a thiol group at each of the terminal dots in each structure:

[chemical structure]

[0219] Specific examples of the compound having B1 as a substructure and the compound having B2 as a substructure include glycol, glutamic acid, aspartic acid, lysine, Tris, iminodiacetic acid, and 2-amino-1,3-propanediol. Glutamic acid, aspartic acid, lysine, or iminodiacetic acid are preferred. Specifically, each of B1 and B2 is preferably any of the following structures:

[chemical structure]

[0220] The L1-benzene ring unit structure may be produced by synthesizing a compound having L1, Q2 and B1 as a substructure and then bonding this compound to a compound having Q1 and the benzene ring.

[0221] The L2-benzene ring unit structure may be produced by synthesizing a compound having L2, Q4 and B2 as a substructure and then bonding this compound to a compound having Q3 and the benzene ring.

[0222] In the present invention, the substructure [L1-T1-(Q2-P3)_{q2}-]ₚ₁-B1-(P2-Q1)_{q1}-P1- and the substructure [L2-T2-(Q3-P6)_{q4}-]ₚ₂-B2-(P5-Q3)_{q3}-P2- may be the same or different and are preferably the same.

[0223] Examples of the unit corresponding to L1-T1-Q2 in the sugar ligand include L3-T1-Q2-COOH and L3-T1-(Q2-P3)_{q2}-Q2-NH₂. Specific examples thereof include L3-O-alkylene having 1 to 12 carbon atoms-COOH and L3-alkylene having 1 to 12 carbon atoms-CO—NH-alkylene having 2 to 12 carbon atoms-NH₂.

[0224] L3 is not particularly limited as long as L3 is a sugar ligand derivative that is converted to L1 by deprotection. The substituent on the sugar ligand is not particularly limited as long as the substituent is routinely used in the field of carbohydrate chemistry. An Ac group is preferred.

[0225] Specifically, the L1-benzene ring unit having linker S1 or the L2-benzene ring unit having linker S2 can be synthesized by appropriately increasing or decreasing the number of carbon atoms of an alkylene chain, and using a compound with a terminal amino group or a terminal carboxyl group converted to a group capable of forming a —CO—, —NH—, —O—, —S—, —O—CO—, —S—CO—, —NH—CO—, —CO—O—, —CO—S— or —CO—NH— bond, with reference to a method described in Examples. Mannose or N-acetylgalactosamine is taken as an example of sugar ligand L1 in Examples. However, sugar ligand L1 may be changed to other sugar ligands for the practice.

[0226] The synthesis of an X-benzene ring unit having linker S3 in the nucleic acid conjugate represented by formula 1 will be described by taking the nucleic acid conjugate represented by formula 12 as an example.

[0227] The X-benzene ring unit in the nucleic acid conjugate represented by formula 12 has bonds represented by P7 and P8 in addition to the bond of the oligonucleotide.

[0228] The —CO—, —NH—, —O—, —S—, —O—CO—, —S—CO—, —NH—CO—, —CO—O—, —CO—S— or —CO—NH— bond represented by P7 and P8 can be appropriately synthesized by selecting a starting material suitable for forming the structure represented by formula 12 with reference to methods for binding reaction described in, for example, The Fourth Series of Experimental Chemistry 19, “Synthesis of Organic Compound I”, Maruzen Co., Ltd. (1992) and The Fourth Series of Experimental Chemistry 20, “Synthesis of Organic Compound II”, Maruzen Co., Ltd. (1992).

[0229] A substructure of the X-benzene ring unit can be produced by sequentially bonding a compound having Q5 as a substructure and a compound having B3 as a substructure to the benzene ring.

[0230] The X-benzene ring unit structure can be produced by separately synthesizing a compound having X and Q7 as a substructure or a compound having X and Q6 as a substructure, and bonding the compound having X and Q7 as a substructure or the compound having X and Q6 as a substructure to a compound having a substructure of a X-benzene ring unit having the benzene ring and Q5 as a substructure to construct the B3 moiety.

[0231] Specifically, the case of having an azide group at the end of the compound having a substructure of an X-benzene ring unit having the benzene ring and Q5 as a substructure will be taken as an example. The X-benzene ring unit structure can be produced by reacting an oligonucleotide allowed to have a terminal binding functional group as disclosed in Examples so that a triazole ring is formed by cycloaddition to construct the B3 moiety.

[0232] Examples of the compound having Q5 as a substructure, the compound having Q6 as a substructure, and the compound having Q7 as a substructure include compounds having a hydroxy group, a carboxyl group, an amino group, and/or a thiol group at both ends of alkylene having 1 to 10 carbon atoms or —(CH₂CH₂O)ₙ₈—CH₂CH₂—.

[0233] The L1-benzene ring unit structure, the L2-benzene ring unit structure, and the X-benzene ring unit structure can be sequentially produced. It is preferred to synthesize the L1-benzene ring unit structure and the L2-benzene ring unit structure and then bond the X-benzene ring unit structure thereto. Particularly, it is preferred to introduce X having the oligonucleotide moiety into the compound near the final step of sugar ligand conjugate synthesis.

[0234] In the present invention, a compound represented by the following formulas 8 to 10 is obtained as an intermediate of synthesis:

[chemical structure]

wherein

[0235] R1 and R2 are each independently a hydrogen atom, a t-butoxycarbonyl group (Boc group), a benzyloxycarbonyl group (Z group), a 9-fluorenylmethyloxycarbonyl group (Fmoc group), —CO—R4, or —CO—B4-[(P9-Q8)_{q7}-T3-L3]ₚ₃,

[0236] P9 and T3 are each independently absent, or —CO—, —NH—, —O—, —S—, —O—CO—, —S—CO—, —NH—CO—, —CO—O—, —CO—S— or —CO—NH—,

[0237] Q8 is absent, or substituted or unsubstituted alkylene having 1 to 12 carbon atoms or —(CH₂CH₂O)ₙ₁—CH₂CH₂— wherein n1 is an integer of 0 to 99, B4 is a bond, or any structure represented by the following formula 8-1, wherein each of the terminal dots in each structure is a binding site to a carbonyl group or P9, and m7, m8, m9 and m10 are each independently an integer of 0 to 10:

[chemical structure]

[0238] p3 is an integer of 1, 2 or 3,

[0239] q7 is an integer of 0 to 10,

[0240] L3 is a sugar ligand,

[0241] Y is —O— (CH₂)ₘ₁₁—NH— or —NH—CO— (CH₂)ₘ₁₂—NH— wherein m1: and m12 are each independently an integer of 1 to 10, R3 is a hydrogen atom, a t-butoxycarbonyl group, a benzyloxycarbonyl group, a 9-fluorenylmethyloxycarbonyl group, —CO—R4, —CO—(CH₂CH₂O)ₙ₂—CH₂CH₂—N₃, or —CO-Q9-B5-(Q10-P10)_{q8}-X1 wherein n2 is an integer of 0 to 99,

[0242] P10 is absent, or —CO—, —NH—, —O—, —S—, —O—CO—, —S—CO—, —NH—CO—, —CO—O—, —CO—S— or —CO—NH—,

[0243] Q9 and Q10 are each independently absent, or substituted or unsubstituted alkylene having 1 to 12 carbon atoms or —(CH₂CH₂O)ₙ₃—CH₂CH₂— wherein n3 is an integer of 0 to 99,

[0244] B5 is any structure represented by the following formula 8-2, wherein the broken lines respectively mean bonds to Q9 and Q10:

[chemical structure]

[chemical structure]

[0245] wherein substitution in a group having a triazole ring occurs at any of nitrogen atoms at positions 1 and 3 of the triazole ring,

[0246] q8 is an integer of 0 to 10,

[0247] X1 is a hydrogen atom or a solid-phase support, and

[0248] R4 is an alkyl group having 2 to 10 carbon atoms substituted with 1 or 2 substituents selected from the group consisting of an amino group unsubstituted or substituted with a t-butoxycarbonyl group, a benzyloxycarbonyl group or a 9-fluorenylmethyloxycarbonyl group, a carboxy group, a maleimide group, and an aralkyloxycarbonyl group.

[chemical structure]

wherein

[0249] R5 and R6 are each independently a hydrogen atom, a t-butoxycarbonyl group, a benzyloxycarbonyl group, a 9-fluorenylmethyloxycarbonyl group, —CO—R4′, or —CO-Q11-(P11-Q11′)_{q6}-T4-L4,

[0250] P11 and T4 are each independently absent, or —CO—, —NH—, —O—, —S—, —O—CO—, —S—CO—, —NH—CO—, —CO—O—, —CO—S— or —CO—NH—,

[0251] each of Q1l and Q11′ is absent, or substituted or unsubstituted alkylene having 1 to 12 carbon atoms or —(CH₂CH₂O)ₙ₄—CH₂CH₂— wherein n4 is an integer of 0 to 99,

[0252] q9 is an integer of 0 to 10,

[0253] L4 is a sugar ligand,

[0254] Y′ is —O—(CH₂)_{m11′}—NH— or —NH—CO—(CH₂)_{m12′}—NH— wherein m11′ and m12′ are each independently an integer of 1 to 10,

[0255] R3′ is a hydrogen atom, a t-butoxycarbonyl group, a benzyloxycarbonyl group, a 9-fluorenylmethyloxycarbonyl group, —CO—R4′, —CO—(CH₂CH₂O)_{n2′}—CH₂CH₂—N₃, or —CO-Q9′-B5′-(Q10′-P10′)_{q8′}-X1′ wherein n2′ is an integer of 0 to 99,

[0256] P10′ is absent, or —CO—, —NH—, —O—, —S—, —O—CO—, —S—CO—, —NH—CO—, —CO—O—, —CO—S— or —CO—NH—,

[0257] Q9′ and Q10′ are each independently absent, or substituted or unsubstituted alkylene having 1 to 12 carbon atoms or —(CH₂CH₂O) n3-CH₂CH₂— wherein n3′ is an integer of 0 to 99,

[0258] B5′ is any structure represented by the following formula 9-1, wherein the broken lines respectively mean bonds to Q9′ and Q10Q:

[chemical structure]

[chemical structure]

[0259] wherein substitution in a group having a triazole ring occurs at any of nitrogen atoms at positions 1 and 3 of the triazole ring,

[0260] q8′ is an integer of 0 to 10,

[0261] X1′ is a hydrogen atom or a solid-phase support, and

[0262] R4′ is an alkyl group having 2 to 10 carbon atoms substituted with 1 or 2 substituents selected from the group consisting of an amino group unsubstituted or substituted with a t-butoxycarbonyl group, a benzyloxycarbonyl group or a 9-fluorenylmethyloxycarbonyl group, a carboxy group, a maleimide group, and an aralkyloxycarbonyl group.

[chemical structure]

wherein

[0263] R7 and R8 are each independently a hydroxy group, a t-butoxy group, a benzyloxy group, —NH—R10, or —NH-Q12-(P12-Q12′)_{q10}-T4-L4,

[0264] P12 and T4 are each independently absent, or —CO—, —NH—, —O—, —S—, —O—CO—, —S—CO—, —NH—CO—, —CO—O—, —CO—S— or —CO—NH—,

[0265] each of Q12 and Q12′ is absent, or substituted or unsubstituted alkylene having 1 to 12 carbon atoms or —(CH₂CH₂O)ₙ₂—CH₂CH₂— wherein n2 is an integer of 0 to 99,

[0266] L4 is a sugar ligand,

[0267] Y2 is —O— (CH₂)ₘ₉—NH— or —NH—CO— (CH₂)ₘ₁₀—NH— wherein m9 and m10 are each independently an integer of 1 to 10,

[0268] q10 is an integer of 0 to 10,

[0269] R9 is a hydrogen atom, a t-butoxycarbonyl group, a benzyloxycarbonyl group, a 9-fluorenylmethyloxycarbonyl group, —CO—R10, —CO—(CH₂CH₂O)ₙ₆—CH₂CH₂—N₃, or —CO-Q13-B6-(Q14-P13)_{q11}-X2 wherein n6 is an integer of 0 to 99,

[0270] P13 is absent, or —CO—, —NH—, —O—, —S—, —O—CO—, —S—CO—, —NH—CO—, —CO—O—, —CO—S— or —CO—NH—,

[0271] Q13 and Q14 are each independently absent, or substituted or unsubstituted alkylene having 1 to 12 carbon atoms or —(CH₂CH₂O)ₙ₇—CH₂CH₂— wherein n7 is an integer of 0 to 99,

[0272] B6 is any structure represented by the following formula 10-1, wherein the broken lines respectively mean bonds to Q13 and Q14:

[chemical structure]

[chemical structure]

wherein substitution in a group having a triazole ring occurs at any of nitrogen atoms at positions 1 and 3 of the triazole ring,

[0273] q11 is an integer of 0 to 10,

[0274] X2 is a hydrogen atom or a solid-phase support, and

[0275] R10 is an alkyl group having 2 to 10 carbon atoms substituted with 1 or 2 substituents selected from the group consisting of an amino group unsubstituted or substituted with a t-butoxycarbonyl group, a benzyloxycarbonyl group or a 9-fluorenylmethyloxycarbonyl group, a carboxy group, a maleimide group, and an aralkyloxycarbonyl group.

[0276] Hereinafter, exemplary production methods will be given in relation to the present invention. In the description about production methods 1 to 17 given below, the same symbols as those representing groups in the compounds represented by formulas 1 to 12 in the nucleic acid derivative, etc. of the present invention may be used. These symbols in production methods 1 to 17 should be understood separately from those in the compounds represented by formulas 1 to 12. The present invention should not be restrictively interpreted by the description of the groups about production methods 1 to 12. For the nucleic acid derivative according to the present invention, X representing the oligonucleotide is described as —O—X in production methods 1 to 17.

[0277] Production Method 1

[0278] For the nucleic acid derivative according to the present invention, the production method can be taken as an example of a method for producing a compound having a substructure represented by formula (I′):

[chemical structure]

wherein P1 is a base-deprotectable protective group such as Fmoc, DMTr represents a p,p′-dimethoxytrityl group, R represents a sugar ligand-tether unit, R′ represents a group in which each hydroxy group of the sugar ligand in R is protected with a base-deprotectable protective group such as an acetyl group, Polymer represents a solid-phase support, and Q′ is —CO—.

[0279] Step 1

[0280] Compound (I-B) can be produced by reacting compound (I-A) with p,p′-dimethoxytrityl chloride at a temperature between 0° C. and 100° C. for 5 minutes to 100 hours in a solvent such as pyridine, if necessary, in the presence of a cosolvent.

[0281] Examples of the cosolvent include methanol, ethanol, dichloromethane, chloroform, 1,2-dichloroethane, toluene, ethyl acetate, acetonitrile, diethyl ether, tetrahydrofuran, 1,2-dimethoxyethane, dioxane, N,N-dimethylformamide (DMF), N,N-dimethylacetamide, N-methylpyrrolidone, pyridine, and water. These cosolvents may be used alone or as a mixture.

[0282] Step 2

[0283] Compound (I-C) can be produced by reacting compound (I-B) at a temperature between room temperature and 200° C. for 5 minutes to 100 hours in the presence of 1 to 1000 equivalents of a secondary amine without a solvent or in a solvent.

[0284] Examples of the solvent include methanol, ethanol, dichloromethane, chloroform, 1,2-dichloroethane, toluene, ethyl acetate, acetonitrile, diethyl ether, tetrahydrofuran, 1,2-dimethoxyethane, dioxane, N,N-dimethylformamide (DMF), N,N-dimethylacetamide, N-methylpyrrolidone, pyridine, and water. These solvents may be used alone or as a mixture.

[0285] Examples of the secondary amine include diethylamine and piperidine.

[0286] Step 3

[0287] Compound (1-E) can be produced by reacting compound (I-C) with compound (I-D) at a temperature between room temperature and 200° C. for 5 minutes to 100 hours in the presence of 1 to 30 equivalents of a base, a condensing agent and, if necessary, 0.01 to 30 equivalents of an additive without a solvent or in a solvent.

[0288] Examples of the solvent include those listed in step 2.

[0289] Examples of the base include cesium carbonate, potassium carbonate, potassium hydroxide, sodium hydroxide, sodium methoxide, potassium tert-butoxide, triethylamine, diisopropylethylamine, N-methylmorpholine, pyridine, 1,8-diazabicyclo[5.4.0]-7-undecene (DBU), and N,N-dimethyl-4-aminopyridine (DMAP).

[0290] Examples of the condensing agent include 1,3-dicyclohexanecarbodiimide (DCC), 1-ethyl-3-(3-dimethylaminopropyl)carbodiimide hydrochloride (EDC), carbonyldiimidazole, benzotriazol-1-yloxytris(dimethylamino)phosphonium hexafluorophosphate, (benzotriazol-1-yloxy)tripyrrolidinophosphonium hexafluorophosphate, 0-(7-azabenzotriazol-1-yl)-N,N,N′,N′-tetramethyluronium hexafluorophosphate (HATU), 0-(benzotriazol-1-yl)-N,N,N′,N′-tetramethyluronium hexafluorophosphate (HBTU), and 2-chloro-1-methylpyridinium iodide.

[0291] Examples of the additive include 1-hydroxybenzotriazole (HOBt) and 4-dimethylaminopyridine (DMAP).

[0292] Compound (I-D) can be obtained by a method known in the art (see, for example, Journal of American Chemical Society, 136, 16958, (2014) or a method equivalent thereto.

[0293] Step 4

[0294] Compound (I-F) can be produced by reacting compound (I-E) with succinic anhydride at a temperature between room temperature and 200° C. for 5 minutes to 100 hours in the presence of 1 to 30 equivalents of a base in a solvent.

[0295] Examples of the solvent include those listed in step 2.

[0296] Examples of the base include those listed in step 3.

[0297] Step 5

[0298] Compound (I-G) can be produced by reacting compound (I-F) with a terminally aminated solid-phase support at a temperature between room temperature and 200° C. for 5 minutes to 100 hours in the presence of 1 to 30 equivalents of a base, a condensing agent and, if necessary, 0.01 to 30 equivalents of an additive without a solvent or in a solvent, and then reacting the resultant with a solution of acetic anhydride in pyridine at a temperature between room temperature and 200° C. for 5 minutes to 100 hours.

[0299] Examples of the solvent include those listed in step 2.

[0300] Examples of the base, the condensing agent and the additive include those respectively listed in step 3.

[0301] Examples of the aminated solid-phase support include long-chain alkylamine controlled pore glass (LCAA-CPG). Such an aminated solid-phase support can be obtained as a commercially available product.

[0302] Step 6

[0303] The nucleic acid conjugate having the sugar ligand-tether-brancher unit represented by formula (I′) can be produced by elongating a corresponding nucleotide strand by a chemical oligonucleotide synthesis method known in the art using compound (I-G), followed by dissociation from the solid phase, deprotection of the protective group and purification.

[0304] Examples of the chemical oligonucleotide synthesis method known in the art can include a phosphoramidite method, a phosphorothioate method, a phosphotriester method, and a CEM method (see Nucleic Acids Research, 35, 3287 (2007)). The nucleotide strand can be synthesized using, for example, ABI3900 high-throughput nucleic acid synthesizer (manufactured by Applied Biosystems, Inc.).

[0305] The dissociation from the solid phase and the deprotection can be performed by treatment with a base at a temperature between −80° C. and 200° C. for 10 seconds to 72 hours in a solvent or without a solvent after the chemical oligonucleotide synthesis.

[0306] Examples of the base include ammonia, methylamine, dimethylamine, ethylamine, diethylamine, isopropylamine, diisopropylamine, piperidine, triethylamine, ethylenediamine, 1,8-diazabicyclo[5.4.0]-7-undecene (DBU) and potassium carbonate.

[0307] Examples of the solvent include water, methanol, ethanol, and THF.

[0308] The oligonucleotide can be purified using a C18 reverse-phase column or an anion-exchange column, preferably these two approaches in combination. The purity of the nucleic acid conjugate thus purified is desirably 90% or higher, preferably 95% or higher.

[0309] In step 3 described above, if necessary, compound (I-D) may be divided into two units and condensed with compound (I-C) at two separate stages. Specifically, when R-Q′ is, for example, R—NH—CO-Q4′-CO— (Q4′ is substituted or unsubstituted alkylene having 1 to 12 carbon atoms), in step 3, compound (I-C) and CH₃CH₂—O—CO-Q4′-CO—OH (Q4′ is as defined above) are condensed in the same way as in step 3, and ethyl ester of the obtained compound can be hydrolyzed with a base such as lithium hydroxide in a solvent such as ethanol or water, followed by further condensation with R′—NH₂ (R′ is as defined above) to obtain the compound of interest. CH₃CH₂—O—CO-Q4′-CO—OH (Q4′ is as defined above) and R′—NH₂ (R′ is as defined above) can be obtained by a method known in the art (see, for example, Journal of American Chemical Society, 136, 16958 (2014)) or a method equivalent thereto. In this context, the substituent and the alkylene moiety in the substituted or unsubstituted alkylene having 1 to 12 carbon atoms, represented by Q4′ are as defined above.

[0310] Although the case where Q is —CO— is taken as an example above, a compound in which Q is not —CO— can also be prepared according to the same method as above or a method known in the art, or a combination thereof by appropriately changing the structure of Q and appropriately changing the reaction conditions.

[0311] Production Method 2

[0312] For the nucleic acid derivative according to the present invention, the production method can be taken as an example of a method for producing a compound having a substructure represented by formula (II′):

[chemical structure]

wherein DMTr, R, R′, X, Q′, and Polymer are as defined above, TBDMS represents a t-butyldimethylsilyl group, and Fmoc represents a 9-fluorenylmethyloxycarbonyl group.

[0313] Step 7

[0314] Compound (II-A) can be produced by reacting compound (I-A) with t-butyldimethylsilyl chloride and dimethylaminopyridine at a temperature between 0° C. and 100° C. for 5 minutes to 100 hours in a solvent such as N,N-dimethylformamide (DMF), preferably in the presence of 2 equivalents of a base.

[0315] Examples of the base include those listed in step 3 of production method 1.

[0316] Step 8

[0317] Compound (II-B) can be produced under the same conditions as in step 1 of production method 1 using compound (II-A).

[0318] Step 9

[0319] Compound (II-C) can be produced by reacting compound (II-B) with n-tetrabutylammonium fluoride (TBAF) at a temperature between room temperature and 200° C. for 5 minutes to 100 hours in a solvent.

[0320] Examples of the solvent include those listed in step 2.

[0321] Step 10

[0322] Compound (II-D) can be produced under the same conditions as in step 2 of production method 1 using compound (II-C).

[0323] Step 11

[0324] Compound (II-E) can be produced under the same conditions as in step 3 of production method 1 using compound (II-D) and compound (I-D)

[0325] Steps 12 to 14

[0326] Compound (II′) can be produced under the same conditions as in steps 4 to 6 of production method 1 using compound (II-E).

[0327] In step 11 described above, if necessary, compound (I-D) may be divided into two units and condensed with compound (II-C) at two separate stages. Specifically, when R-Q′ is, for example, R—NH—CO-Q4′-CO— (Q4′ is substituted or unsubstituted alkylene having 1 to 12 carbon atoms), in step 11, compound (II-C) and CH₃CH₂—O—CO-Q4′-CO—OH (Q4′ is as defined above) are condensed in the same way as in step 11, and ethyl ester of the obtained compound can be hydrolyzed with a base such as lithium hydroxide in a solvent such as ethanol or water, followed by further condensation with R′—NH₂ (R′ is as defined above) to obtain the compound of interest. CH₃CH₂—O—CO-Q4′-CO—OH (Q4′ is as defined above) and R′—NH₂ (R′ is as defined above) can be obtained by a method known in the art (see, for example, Journal of American Chemical Society, 136, 16958 (2014)) or a method equivalent thereto.

[0328] Although the case where Q is —CO— is taken as an example above, a compound in which Q is not —CO— can also be prepared according to the same method as above or a method known in the art, or a combination thereof by appropriately changing the structure of Q and appropriately changing the reaction conditions.

[0329] Production Method 3

[0330] For the nucleic acid derivative according to the present invention, the production method can be taken as an example of a method for producing a compound having a substructure represented by formula (III′):

[chemical structure]

wherein DMTr, Fmoc, R, R′, Q′, X and Polymer are as defined above.

[0331] Compound (III′) can be produced under the same conditions as in steps 1 to 6 of production method 1 using compound (III-A). Compound (III-A) can be obtained as a commercially available product.

[0332] Step 15

[0333] Compound (III-B) can be produced under the same conditions as in step 1 of production method 1 using compound (III-A).

[0334] Compound (III-A) can be purchased as a commercially available product.

[0335] Step 16

[0336] Compound (III-C) can be produced under the same conditions as in step 2 of production method 1 using compound (III-B).

[0337] Step 17

[0338] Compound (III-E) can be produced under the same conditions as in step 3 of production method 1 using compound (III-C).

[0339] Steps 18 to 20

[0340] Compound (III′) can be produced under the same conditions as in steps 4 to 6 of production method 1 using compound (III-E).

[0341] In step 17 described above, if necessary, compound (I-D) may be divided into two units and condensed with compound (III-C) at two separate stages. Specifically, when R-Q′ is, for example, —NH—CO-Q4′-CO— (Q4′ is substituted or unsubstituted alkylene having 1 to 12 carbon atoms), in step 17, compound (III-C) and CH₃CH₂—O—CO-Q4′-CO—OH (Q4′ is as defined above) are condensed in the same way as in step 17, and ethyl ester of the obtained compound can be hydrolyzed with a base such as lithium hydroxide in a solvent such as ethanol or water, followed by further condensation with R′—NH₂ (R′ is as defined above) to obtain the compound of interest. CH₃CH₂—O—CO-Q4′-CO—OH (Q4′ is as defined above) and R′—NH₂ (R′ is as defined above) can be obtained by a method known in the art (see, for example, Journal of American Chemical Society, 136, 16958 (2014)) or a method equivalent thereto.

[0342] Although the case where Q is —CO— is taken as an example above, a compound in which Q is not —CO— can also be prepared according to the same method as above or a method known in the art, or a combination thereof by appropriately changing the structure of Q and appropriately changing the reaction conditions.

[0343] Production Method 4

[0344] For the nucleic acid derivative according to the present invention, the production method can be taken as an example of a method for producing a compound having a substructure represented by formula (IV′):

[chemical structure]

[0345] wherein DMTr, Fmoc, R, R′, Q′, X and Polymer are as defined above.

[0346] Compound (IV′) can be produced under the same conditions as in steps 1 to 6 of production method 1 using compound (IV-A). Compound (IV-A) can be obtained as a commercially available product.

[0347] In step 23 described above, if necessary, compound (I-D) may be divided into two units and condensed with compound (IV-C) at two separate stages. Specifically, when R′-Q′ is, for example, —NH—CO-Q4′-CO— (Q4′ is substituted or unsubstituted alkylene having 1 to 12 carbon atoms), in step 23, compound (IV-C) and CH₃CH₂—O—CO-Q4′-CO—OH (Q4′ is as defined above) are condensed in the same way as in step 23, and ethyl ester of the obtained compound can be hydrolyzed with a base such as lithium hydroxide in a solvent such as ethanol or water, followed by further condensation with R′—NH₂ (R′ is as defined above) to obtain the compound of interest. CH₃CH₂—O—CO-Q4′-CO—OH (Q4′ is as defined above) and R′—NH₂ (R′ is as defined above) can be obtained by a method known in the art (see, for example, Journal of American Chemical Society, 136, 16958 (2014)) or a method equivalent thereto.

[0348] Although the case where Q is —CO— is taken as an example above, a compound in which Q is not —CO— can also be prepared according to the same method as above or a method known in the art, or a combination thereof by appropriately changing the structure of Q and appropriately changing the reaction conditions.

[0349] Production Method 5

[0350] For the nucleic acid derivative according to the present invention, the production method can be taken as an example of a method for producing a compound having a substructure represented by formula (V′):

[chemical structure]

wherein DMTr, R, R′, X, Q′, TBDMS, Fmoc and Polymer are as defined above.

[0351] Compound (V′) can be produced under the same conditions as in steps 1 to 7 of production method 2 using compound (IV-A). Compound (IV-A) can be obtained as a commercially available product.

[0352] In step 31 described above, if necessary, compound (I-D) may be divided into two units and condensed with compound (V-D) at two separate stages. Specifically, when R′-Q′ is, for example, —NH—CO-Q4′-CO— (Q4′ is substituted or unsubstituted alkylene having 1 to 12 carbon atoms), in step 31, compound (V-D) and CH₃CH₂—O—CO-Q4′-CO—OH (Q4′ is as defined above) are condensed in the same way as in step 31, and ethyl ester of the obtained compound can be hydrolyzed with a base such as lithium hydroxide in a solvent such as ethanol or water, followed by further condensation with R′—NH₂ (R′ is as defined above) to obtain the compound of interest.

[0353] CH₃CH₂—O—CO-Q4′-CO—OH (Q4′ is as defined above) and R′—NH₂ (R′ is as defined above) can be obtained by a method known in the art (see, for example, Journal of American Chemical Society, 136, 16958 (2014)) or a method equivalent thereto.

[0354] Although the case where Q is —CO— is taken as an example above, a compound in which Q is not —CO— can also be prepared according to the same method as above or a method known in the art, or a combination thereof by appropriately changing the structure of Q-OH and appropriately changing the reaction conditions.

[0355] Production Method 6

[0356] An exemplary method for producing the nucleic acid conjugate of the present invention in which a sugar ligand-tether-brancher unit is bonded to the 5′ end of the oligonucleotide will be given below.

[chemical structure]

wherein R, R′, Q′, DMTr and X are as defined above.

[0357] Step 35

[0358] Compound (I-H) can be produced by reacting compound (II-E) with 2-cyanoethyl-N,N,N′,N′-tetraisopropylphosphodiamidite at a temperature between room temperature and 200° C. for 5 minutes to 100 hours in the presence of a base and a reaction accelerator without a solvent or in a solvent.

[0359] Examples of the solvent include those listed in step 2 of production method 1.

[0360] Examples of the base include those listed in step 3 of production method 1.

[0361] Examples of the reaction accelerator include 1H-tetrazole, 4,5-dicyanoimidazole, 5-ethylthiotetrazole, and 5-benzylthiotetrazole. These reaction accelerators can be purchased as commercially available products.

[0362] Step 36

[0363] Compound (I″) can be produced by elongating an oligonucleotide strand and finally modifying the 5′ end of the oligonucleotide with a sugar ligand-tether-brancher unit using compound (I-H), followed by dissociation from the solid phase, deprotection of the protective group and purification. In this context, the dissociation from the solid phase, the deprotection of the protective group and the purification can each be performed in the same way as in step 7 of production method 1.

[0364] Production Method 7

[0365] An exemplary method for producing the nucleic acid conjugate of the present invention in which a sugar ligand-tether-brancher unit is bonded to the 5′ end of the oligonucleotide will be given below.

[0366] The nucleic acid conjugate can be produced under the same conditions as in steps 35 and 36 of production method 6.

[chemical structure]

wherein R, R′, Q′, DMTr and X are as defined above.

[0367] Production Method 8

[0368] An exemplary method for producing the nucleic acid conjugate of the present invention in which a sugar ligand-tether-brancher unit is bonded to the 5′ end of the oligonucleotide will be given below.

[0369] The nucleic acid conjugate can be produced under the same conditions as in steps 35 and 36 of production method 6.

[chemical structure]

wherein R, R′, Q′, DMTr and X are as defined above.

[0370] Production Method 9

[0371] An exemplary method for producing the nucleic acid conjugate of the present invention in which a sugar ligand-tether-brancher unit is bonded to the 5′ end of the oligonucleotide will be given below.

[0372] The nucleic acid conjugate can be produced under the same conditions as in steps 35 and 36 of production method 6.

[chemical structure]

wherein R, R′, Q′, DMTr and X are as defined above.

[0373] Production Method 10

[0374] An exemplary method for producing the nucleic acid conjugate of the present invention in which a sugar ligand-tether-brancher unit is bonded to the 5′ end of the oligonucleotide will be given below.

[0375] The nucleic acid conjugate can be produced under the same conditions as in steps 35 and 36 of production method 6.

[chemical structure]

wherein R, R′, Q′, DMTr and X are as defined above.

[0376] Production Method 11

[0377] A nucleic acid conjugate having a double-stranded nucleic acid can be obtained by dissolving each of a sense strand having a sugar ligand-tether-brancher unit at the 3′ or 5′ end of a sense strand constituting the double-stranded nucleic acid, and an antisense strand constituting the double-stranded nucleic acid, in water or an appropriate buffer solution, and mixing the solutions.

[0378] Examples of the buffer solution include acetate buffer solutions, Tris buffer solutions, citrate buffer solutions, phosphate buffer solutions, and water. These buffer solutions are used alone or as a mixture.

[0379] The mixing ratio between the sense strand and the antisense strand is preferably 0.5 to 2 equivalents, more preferably 0.9 to 1.1 equivalents, further preferably 0.95 equivalents to 1.05 equivalents, of the antisense strand with respect to 1 equivalent of the sense strand.

[0380] The sense strand and the antisense strand thus mixed may be appropriately subjected to annealing treatment. The annealing treatment can be performed by heating the mixture of the sense strand and the antisense strand to preferably 50 to 100° C., more preferably 60 to 100° C., further preferably 80 to 100° C., followed by slow cooling to room temperature.

[0381] The antisense strand can be obtained in conformity to the aforementioned oligonucleotide synthesis method known in the art.

[0382] Production Method 12

[0383] For the nucleic acid derivative according to the present invention, the production method can be taken as an example of a method for producing a compound having a substructure represented by formula (VI′):

[chemical structure]

[chemical structure]

wherein DMTr, R, R′, X, Q′, Polymer, and Fmoc are as defined above, TBS represents a t-butyldimethylsilyl group, R0 and Rx are the same or different and each represent a hydrogen atom, C1-C10 alkylene or C3-C8 cycloalkylene, and W is C1-C10 alkylene or C3-C8 cycloalkylene or may form a C4-C8 nitrogen-containing heterocyclic ring together with R0.

[0384] Step 45

[0385] Compound (VI-B) can be produced under the same conditions as in step 1 of production method 1 using compound (VI-A).

[0386] Compound (VI-A) can be obtained as a commercially available product, or by a method known in the art (e.g., Bioorganic & Medicinal Chemistry Letters, Vol. 11, p. 383-386) or a method equivalent thereto.

[0387] Step 46

[0388] Compound (VI-C) can be produced under the same conditions as in step 2 of production method 1 using compound (VI-B).

[0389] Step 47

[0390] Compound (VI-D) can be produced under the same conditions as in step 3 of production method 1 using compound (VI-C).

[0391] Step 48

[0392] Compound (VI-E) can be produced under the same conditions as in step 2 of production method 1 using compound (VI-D).

[0393] Step 49

[0394] Compound (VI-G) can be produced under the same conditions as in step 3 of production method 1 using compound (VI-E) and compound (VI-F).

[0395] Step 50

[0396] Compound (VI-H) can be produced under the same conditions as in step 9 of production method 2 using compound (VI-G).

[0397] Steps 51 to 53

[0398] Compound (VI′) can be produced under the same conditions as in steps 4 to 6 of production method 1 using compound (VI-H), compound (VI-I) and compound (VI-J).

[0399] Steps 45 to 53 can also be carried out by a method known in the art (e.g., a method described in International Publication No. WO 2015/105083) or a method equivalent thereto.

[0400] Compound (VI-F) can be obtained by a method known in the art (e.g., a method described in Journal of American Chemical Society, Vol. 136, p. 16958, 2014) or a method equivalent thereto.

[0401] Production Method 13

[0402] A sugar ligand-tether unit in which each of P1 and P4 in formula 2 is —NH—CO—, —O—CO— or —S—CO— can be produced by the following method.

[chemical structure]

[chemical structure]

wherein Q1, Q2, Q3, Q4, Q5, P2, P3, P5, P6, P7, T1, T2, L1, L2, q1, q2, q3 and q4 are each as defined above, q2′ represents an integer smaller by 1 than q2, q4′ represents an integer smaller by 1 than q4, P1′ and P4′ each independently represent —NH—CO—, —O—CO— or —S—CO—, Z represents H, OH, NH₂, SH, a chlorine atom, a bromine atom, an iodine atom, methanesulfonyloxy, p-toluenesulfonyloxy or carboxylic acid, B1′ and B2′ each represent any one structure of the following formulas, and PG1, PG2, PG3, PG4, PG5, PG6 and PG7 each represent an appropriate protective group.

### Formulas:

[chemical structure]

m1, m2, m3 and m4 each independently represent an integer of 0 to 10.

[0404] Step 54

[0405] Compound (VII-C) can be produced by adding polymer-supported triphenylphosphine to compound (VII-A) with compound (VII-B) in a solvent such as tetrahydrofuran, and reacting the mixture with a solution of diisopropyl azodicarboxylate in toluene under ice cooling.

[0406] Examples of the solvent include those listed in step 2 of production step 1.

[0407] Compound (VII-A) can be obtained as a commercially available product.

[0408] Step 55

[0409] Compound (VII-D) can be produced by reacting compound (VII-C) under ice cooling in the presence of a base in a solvent such as methanol.

[0410] Examples of the solvent include those listed in step 2 of production step 1.

[0411] Examples of the base include those listed in step 3 of production step 1.

[0412] Step 56

[0413] Compound (VII-F) can be produced under the same conditions as in step 3 of production step 1 using compound (VII-D) and compound (VII-E).

[0414] Step 57

[0415] Compound (VII-H) can be produced under the same conditions as in step 3 of production step 1 using compound (VII-F) and compound (VII-G).

[0416] Step 58

[0417] Compound (VII-J) can be produced under the same conditions as in step 3 of production step 1 using compound (VII-H) and compound (VII-I).

[0418] Also, compound (VII-J) having a desired value of q1 can be produced by repetitively performing step DP1 described below and step 58.

[0419] Step 59

[0420] Compound (VII-L) can be produced under the same conditions as in step 3 of production step 1 using compound (VII-J) and compound (VII-K).

[0421] Step 60

[0422] Compound (VII-N) can be produced under the same conditions as in step 3 of production step 1 using compound (VII-L) and compound (VII-M).

[0423] Steps 61 to 63

[0424] Compound (VII′) can be produced under the same conditions as in step 3 of production step 1 using compound (VII-0), compound (VII-P) and compound (VII-Q).

[0425] Also, compound (VII′) having a desired value of q3 can be produced by repetitively performing step DP1 described below and step 61.

[0426] Step DP1

[0427] A desired compound can be produced by appropriately using a method commonly used in organic synthetic chemistry [e.g., a method described in Protective Groups in Organic Synthesis, third edition, T. W. Greene, John Wiley & Sons Inc. (1999)].

[0428] Compound (VII-B), compound (VII-E), compound (VII-G), compound (VII-I), compound (VII-K), compound (VII-M), compound (VII-0), compound (VII-P) and compound (VII-Q) can be obtained as commercially available products, or by methods described in “The Fourth Series of Experimental Chemistry, Organic Synthesis, p. 258, Maruzen Co., Ltd. (1992)” and “March's Advanced Organic Chemistry: Reactions, Mechanisms, and Structure, 7^{th} Edition” in combination or methods equivalent thereto.

[0429] Production Method 14

[0430] A unit in which P7 in formula 4 is —O— can be produced by the following method.

[chemical structure]

wherein Q5, P7 and q5 are each as defined above, q5″ represents an integer smaller by 2 than q5, q5′ represents an integer smaller by 1 than q5, Z2 represents H, OH, NH₂ or SH, PG8 and PG9 each represent an appropriate protective group, LC represents a sugar ligand-tether unit, and E represents carboxylic acid or maleimide.

[0431] Step 64

[0432] Compound (VIII-C) can be produced under the same conditions as in step 3 of production step 1 using compound (VIII-A) and compound (VIII-B).

[0433] Also, compound (VIII-C) having a desired value of q5″ can be produced by repetitively performing step DP2 described below and step 64. Compound (VIII-B) can be obtained as a commercially available product, or by methods described in “The Fourth Series of Experimental Chemistry, Organic Synthesis, p. 258, Maruzen Co., Ltd. (1992)” and “March's Advanced Organic Chemistry: Reactions, Mechanisms, and Structure, 7^{th} Edition” in combination or methods equivalent thereto.

[0434] Step 65

[0435] Compound (VIII′) can be produced under the same conditions as in step 3 of production step 1 using compound (VIII-C) and compound (VIII-D).

[0436] Compound (VIII-D) can be obtained as a commercially available product, or by methods described in “The Fourth Series of Experimental Chemistry, Organic Synthesis, p. 258, Maruzen Co., Ltd. (1992)” and “March's Advanced Organic Chemistry: Reactions, Mechanisms, and Structure, 7th Edition” in combination or methods equivalent thereto.

[0437] Step DP2

[0438] A desired compound can be produced by appropriately using a method commonly used in organic synthetic chemistry [e.g., a method described in Protective Groups in Organic Synthesis, third edition, T. W. Greene, John Wiley & Sons Inc. (1999)].

[0439] Production Method 15

[0440] A sugar ligand-tether unit in which each of P1 and P4 in formula 2 is —O— can be produced by the following method.

[chemical structure]

[chemical structure]

wherein Q1, Q2, Q3, Q4, P2, P3, P5, P6, T1, T2, L1, L2, q1, q2, q3, q4, q2′, q4′, Z, B1′ and B2′ are each as defined above, and PG10, PG11, PG12, PG13, PG14 and PG15 each represent an appropriate protective group.

### Formulas:

[chemical structure]

m1, m2, m3 and m4 are as defined above.

[0442] Step 66

[0443] Compound (IX-C) can be produced by dissolving compound (IX-A) and compound (IX-B) in a solvent such as N,N′-dimethylformamide, adding a base such as potassium bicarbonate to the solution, and reacting the mixture at room temperature to 200° C. for 5 minutes to 100 hours. Examples of the solvent include those listed in step 2 of production step 1.

[0444] Examples of the base include those listed in step 3 of production step 1.

[0445] Step 67

[0446] Compound (IX-E) can be produced by dissolving compound (IX-C) and compound (IX-D) in a solvent such as N,N′-dimethylformamide, adding a base such as potassium bicarbonate to the solution, and reacting the mixture at room temperature to 200° C. for 5 minutes to 100 hours.

[0447] Examples of the solvent include those listed in step 2 of production step 1.

[0448] Examples of the base include those listed in step 3 of production step 1.

[0449] Compound (IX-A) can be obtained as a commercially available product.

[0450] Step 68

[0451] Compound (IX-G) can be produced under the same conditions as in step 3 of production step 1 using compound (IX-E) and compound (IX-F).

[0452] Step 69

[0453] Compound (IX-I) can be produced under the same conditions as in step 3 of production step 1 using compound (IX-G) and compound (IX-H).

[0454] Also, compound (VII-J) having a desired value of q1 can be produced by repetitively performing step DP and step 69.

[0455] Step 70

[0456] Compound (IX-K) can be produced under the same conditions as in step 3 of production step 1 using compound (IX-I) and compound (IX-J).

[0457] Step 71

[0458] Compound (IX-M) can be produced under the same conditions as in step 3 of production step 1 using compound (IX-K) and compound (IX-L).

[0459] Steps 72 to 74

[0460] Compound (IX′) can be produced under the same conditions as in step 3 of production step 1 using compound (IX-M), compound (IX-N), compound (IX-0) and compound (IX-P).

[0461] Also, compound (IX′) having a desired value of q3 can be produced by repetitively performing step DP3 described below and step 72.

[0462] Step DP3

[0463] A desired compound can be produced by appropriately using a method commonly used in organic synthetic chemistry [e.g., a method described in Protective Groups in Organic Synthesis, third edition, T. W. Greene, John Wiley & Sons Inc. (1999)].

[0464] Compound (IX′-B), compound (IX′-D), compound (IX′-F), compound (IX′-H), compound (IX′-J), compound (IX′-L), compound (IX′-N), compound (IX′-0) and compound (IX′-P) can be obtained as commercially available products, or by methods described in “The Fourth Series of Experimental Chemistry, Organic Synthesis, p. 258, Maruzen Co., Ltd. (1992)” and “March's Advanced Organic Chemistry: Reactions, Mechanisms, and Structure, 7^{th} Edition” in combination or methods equivalent thereto.

[0465] Production Method 16

[0466] The following method can also be used as a method for producing the nucleic acid conjugates of formulas 1 to 8.

[chemical structure]

wherein LC, Q5, Q6, Q7, P7, P8, q5′, q6 and X are as defined above.

[0467] Step 75

[0468] Compound (X-B) can be produced by reacting compound (XIII″) with compound (X-A) at 0° C. to 100° C. for 10 seconds to 100 hours in a solvent.

[0469] Examples of the solvent include water, phosphate buffer solutions, sodium acetate buffer solutions, and dimethyl sulfoxide. These solvents may be used alone or as a mixture.

[0470] Compound (VIII′) can be obtained by use of production method 14.

[0471] Compound (X-A) can also be obtained by a method known in the art (e.g., Bioconjugate Chemistry, Vol. 21, p. 187-202, 2010; and Current Protocols in Nucleic Acid Chemistry, September 2010; CHAPTER: Unit 4.41) or a method equivalent thereto.

[0472] Step 76

[0473] Compound (X′) can be produced by reacting compound (X-B) at a temperature between room temperature and 200° C. for 5 minutes to 100 hours under conditions of pH 8 or higher such as in an aqueous sodium carbonate solution or ammonia water.

[0474] Production Method 17

[0475] The following method can also be used as a method for producing the nucleic acid conjugates of formulas 1 to 8.

[chemical structure]

wherein LC, Q5, Q6, Q7, P7, P8, q5′, q6 and X are as defined above.

[0476] Step 77

[0477] Compound (XI-A) can be obtained by using compound (VIII) and a method known in the art (e.g., a method described in Bioconjugate Chemistry, Vol. 26, p. 1451-1455, 2015) or a method equivalent thereto.

[0478] Compound (VIII′″) can be obtained by use of production method 14.

[0479] Step 78

[0480] Compound (XI′) can be obtained by using compound (XI-A) and compound (XI-B) and a method known in the art (e.g., a method described in Bioconjugate Chemistry, Vol. 26, p. 1451-1455, 2015) or a method equivalent thereto.

[0481] Compound (XI-B) can be obtained by a method described in Bioconjugate Chemistry, Vol. 26, p. 1451-1455, 2015) or a method equivalent thereto.

[0482] Step 79

[0483] In another method, compound (XI′) can be obtained directly from compound (XI-A) by a method known in the art (see, for example, Bioconjugate Chemistry, Vol. 22, p. 1723-1728, 2011) or a method equivalent thereto.

[0484] The nucleic acid conjugate described in the present specification may be obtained as a salt, for example, an acid-addition salt, a metal salt, an ammonium salt, an organic amine-addition salt, or an amino acid-addition salt.

[0485] Examples of the acid-addition salt include: inorganic acid salts such as hydrochloride, sulfate, and phosphate; and organic acid salts such as acetate, maleate, fumarate, citrate, and methanesulfonate. Examples of the metal salt include: alkali metal salts such as sodium salt and potassium salt; alkaline earth metal salts such as magnesium salt and calcium salt; and aluminum salt and zinc salt. Examples of the ammonium salt include salts of ammonium, tetramethylammonium, and the like. Examples of the organic amine-addition salt include addition salts of morpholine, piperidine, and the like. Examples of the amino acid-addition salt include addition salts of lysine, glycine, phenylalanine, and the like.

[0486] In the case of preparing the salt of the nucleic acid conjugate described in the present specification, the conjugate obtained in the form of the desired salt can be purified directly, or the conjugate obtained in a free form can be dissolved or suspended in an appropriate solvent, and a corresponding acid or base is added to the solution or the suspension, followed by isolation or purification. In order to convert counter ions forming the conjugate salt to different counter ions, the conjugate salt can be dissolved or suspended in an appropriate solvent, and then, several equivalents to a large excess of an acid, a base and/or a salt (e.g., an inorganic salt such as sodium chloride or ammonium chloride) is added to the solution or the suspension, followed by isolation or purification.

[0487] Some nucleic acid conjugates described in the present specification may have stereoisomers such as geometric isomers and optical isomers, tautomers, or the like. All possible isomers and mixtures thereof are also encompassed in the present invention.

[0488] The nucleic acid conjugate described in the present specification may be present in the form of an adduct with water or various solvents. These adducts are also encompassed the nucleic acid conjugate of the present invention.

[0489] The nucleic acid conjugate of the present invention further encompasses molecules in which a portion or the whole of the atoms is substituted with an atom having an atomic mass number different therefrom (isotope) (e.g., a deuterium atom).

[0490] The pharmaceutical composition of the present invention comprises the nucleic acid conjugate represented by formula 1. The nucleic acid conjugate of the present invention, owing to having sugar ligands L1 and L2, is recognized by a target cell and transferred into the cell.

[0491] The nucleic acid conjugate of the present invention can be used in the treatment of diseases related to a target gene by inhibiting (reducing or silencing) the expression of the target gene in vivo when administered to a mammal.

[0492] In the case of using the nucleic acid conjugate of the present invention as a therapeutic agent or a prophylactic agent, the administration route is not particularly limited, and an administration route most effective for treatment is desirably used. Examples thereof include intravenous administration, subcutaneous administration, intramuscular administration. Subcutaneous administration is preferred.

[0493] The dose differs depending on the pathological condition or age of the recipient, the administration route, etc. The dose can be, for example, a daily dose of 0.1 μg to 1000 mg, more preferably 1 to 100 mg, in terms of the amount of the double-stranded oligonucleotide.

[0494] Examples of the preparation appropriate for intravenous administration or intramuscular administration include injections. A prepared liquid formulation may be used directly in the form of, for example, an injection. Alternatively, the liquid formulation may be used after removal of the solvent by, for example, filtration or centrifugation, or the liquid formulation may be used after being freeze-dried and/or may be used after being supplemented with, for example, an excipient such as mannitol, lactose, trehalose, maltose, or glycine and then freeze-dried.

[0495] In the case of an injection, the liquid formulation or the solvent-free or freeze-dried composition is preferably mixed with, for example, water, an acid, an alkali, various buffer solutions, physiological saline, or an amino acid transfusion, to prepare the injection. Alternatively, the injection may be prepared by the addition of, for example, an antioxidant such as citric acid, ascorbic acid, cysteine, or EDTA or a tonicity agent such as glycerin, glucose or sodium chloride. Also, the injection can also be cryopreserved by the addition of a cryopreserving agent such as glycerin.

[0496] The composition of the present invention can be administered to a mammalian cell so that the double-stranded nucleic acid in the composition of the present invention can be transferred into the cell.

[0497] The in vivo method for transferring the nucleic acid conjugate of the present invention to a mammalian cell can be performed according to transfection procedures known in the art that can be performed in vivo. The composition of the present invention can be intravenously administered to a mammal including a human and thereby delivered to the liver so that the double-stranded nucleic acid in the composition of the present invention can be transferred into the liver or a liver cell.

[0498] The double-stranded nucleic acid in the composition of the present invention thus transferred into the liver or a liver cell decreases the expression of APCS gene in the liver cell and can treat or prevent an amyloid-related disease. Examples of the amyloid-related disease include diseases caused by a disorder mediated by amyloid fibrils containing APCS. Specifically, the amyloid-related disease is a disease in which aberrant insoluble protein fibrils known as amyloid fibrils accumulate in tissues, causing an organ disorder. More specifically, examples of the amyloid-related disease include AL amyloidosis, AA amyloidosis, ATTR amyloidosis, dialysis-related amyloidosis, cardiac failure involving amyloid accumulation, nephropathy involving amyloid accumulation, senile amyloidosis and carpal-tunnel syndrome which are systemic amyloidosis, and Alzheimer's dementia, brain amyloid angiopathy and type II diabetes mellitus which are localized amyloidosis. The recipient of the nucleic acid conjugate of the present invention is a mammal, preferably a human.

[0499] In the case of using the nucleic acid conjugate of the present invention as a therapeutic agent or a prophylactic agent for an amyloid-related disease, the administration route used is desirably an administration route most effective for treatment. Examples thereof preferably include intravenous administration, subcutaneous administration and intramuscular administration. Subcutaneous administration is more preferred.

[0500] The dose differs depending on the pathological condition or age of the recipient, the administration route, etc. The dose can be, for example, a daily dose of 0.1 μg to 1000 mg, preferably 1 to 100 mg, in terms of the amount of the double-stranded nucleic acid.

[0501] The present invention also provides a nucleic acid conjugate for use in the treatment of a disease; a pharmaceutical composition for use in the treatment of a disease; use of a nucleic acid conjugate for treating a disease; use of a nucleic acid conjugate in the production of a medicament for treatment of a disease; a nucleic acid conjugate for use in the production of a medicament for treatment of a disease; and a method for treating or preventing a disease, comprising administering an effective amount of a nucleic acid conjugate to a subject in need thereof.

### EXAMPLES

[0502] Next, the present invention will be specifically described with reference to Reference Examples, Examples and Test Examples. However, the present invention is not limited by these Examples and Test Examples. Proton nuclear magnetic resonance spectra (¹H NMR) shown in Examples and Reference Examples were measured at 270 MHz, 300 MHz or 400 MHz, and no exchangeable proton may be clearly observed depending on compounds and measurement conditions. Signal multiplicity is indicated as usually used, and br means broad and represents an apparently broad signal.

[0503] UPLC analysis employed the following conditions:

Mobile phase A: aqueous solution containing 0.1% formic acid, B: acetonitrile solution
Gradient: linear gradient from 10% to 90% of mobile phase B (3 min)
Column: ACQUITY UPLC BEH C18 manufactured by Waters Corp. (1.7 μm, inside diameter: 2.1×50 mm)
Flow rate: 0.8 mL/min
PDA detection wavelength: 254 nm (detection range: 190 to 800 nm)

[0504] Reference Example compounds are shown in Tables X-1 to X-4.

TABLE X-1
compounds A1 to A7

| | |
|---|---|
| [chemical structure] | A1 |
| [chemical structure] | A2 |
| [chemical structure] | A3 |
| [chemical structure] | A4 |
| [chemical structure] | A5 |
| [chemical structure] | A6 |
| [chemical structure] | A7 |

TABLE X-2
compounds B1 to B3

| | |
|---|---|
| [chemical structure] | B1 |
| [chemical structure] | B2 |
| [chemical structure] | B3 |

TABLE X-3
compounds C1 to C17

| | |
|---|---|
| [chemical structure] | C1 |
| [chemical structure] | C2 |
| [chemical structure] | C3 |
| [chemical structure] | C4 |
| [chemical structure] | C5 |
| [chemical structure] | C6 |
| [chemical structure] | C7 |
| [chemical structure] | C8 |
| [chemical structure] | C9 |
| [chemical structure] | C10 |
| [chemical structure] | C11 |
| [chemical structure] | C12 |
| [chemical structure] | C13 |
| [chemical structure] | C14 |
| [chemical structure] | C15 |
| [chemical structure] | C16 |
| [chemical structure] | C17 |

[chemical structure]

TABLE X-4
compounds D1 to D11

| | |
|---|---|
| [chemical structure] | D1 |
| [chemical structure] | D2 |
| [chemical structure] | D3 |
| [chemical structure] | D4 |
| [chemical structure] | D5 |
| [chemical structure] | D6 |
| [chemical structure] | D7 |
| [chemical structure] | D8 |
| [chemical structure] | D9 |
| [chemical structure] | D10 |
| [chemical structure] | D11 |

### Reference Example 1

[chemical structure]

[0506] Synthesis of Compound RE1-2

[0507] Step 1 of Reference Example 1

[0508] Compound RE1-1 (0.8755 g, 1.9567 mmol) synthesized by the method described in Journal of American Chemical Society, Vol. 136, p. 16958-16961, 2014 was dissolved in tetrahydrofuran (10 mL). To the solution, 1,3-dicyclohexanecarbodiimide (DCC, 0.4247 g, 2.0584 mmol) and N-hydroxysuccinimide (0.2412 g, 2.0958 mmol) were added, and the mixture was stirred overnight at room temperature. A precipitated solid was removed from the reaction mixture, and the solvent was distilled off under reduced pressure. The obtained mixture was dissolved in N,N′-dimethylformamide (DMF). To the solution, 2-aminoethyl maleimide bromate (0.6479 g, 2.5491 mmol) and diisopropylethylamine (1.7 mL, 9.7835 mmol) were added, and then, the mixture was stirred overnight at room temperature. The solvent in the reaction solution was distilled off under reduced pressure, followed by elution by reverse-phase column chromatography (water/methanol=80/20) to obtain compound RE1-2 (0.8502 g, yield: 76%). ESI-MS m/z: 570 (M+H)⁺;

[0509] ¹H-NMR (DMSO-D₆) δ: 1.45-1.56 (4H, m), 1.78 (3H, s), 1.90 (3H, s), 1.97 (2H, t, J=7.0 Hz), 2.00 (3H, s), 2.11 (3H, s), 3.18-3.19 (2H, m), 3.38-3.45 (3H, m), 3.64-3.71 (1H, m), 3.85-3.89 (1H, m), 4.01-4.04 (3H, m), 4.48 (1H, d, J=8.6 Hz), 4.95-4.98 (1H, m), 5.21 (1H, d, J=3.5 Hz), 6.99 (2H, s), 7.81-7.87 (2H, m).

[0510] Synthesis of Compound RE1-4

[0511] Step 2 of Reference Example 1

[0512] Compound RE1-1 (0.9602 g, 2.1460 mmol) was dissolved in N,N′-dimethylformamide (10 mL). To the solution, N-Boc-ethylenediamine (manufactured by Sigma-Aldrich Co. LLC, 0.6877 g, 4.292 mmol), diisopropylethylamine (1.90 mL, 10.87 mmol), and 2-(1H-benzotriazol-1-yl)-1,1,3,3-tetramethyluronium hexafluorophosphate (manufactured by Wako Pure Chemical Industries, Ltd., 1.6437 g, 4.3229 mmol) were added, and the mixture was stirred overnight at room temperature. Water was added to the reaction solution, followed by extraction with chloroform twice. Then, the organic layer was washed with saturated saline and dried over anhydrous magnesium sulfate. The solvent was distilled off under reduced pressure to obtain a crude product of compound RE1-3.

[0513] ESI-MS m/z: 590 (M+H)+

[0514] Step 3 of Reference Example 1

[0515] Compound RE1-3 (1.2654 g, 2.1460 mmol) synthesized in step 1 in the synthesis of compound RE1-4 was dissolved in dichloromethane (15 mL). To the solution, trifluoroacetic acid (4 mL) was added, and the mixture was stirred overnight at room temperature. Water was added to the reaction solution, followed by extraction with ethyl acetate. Then, the organic layer was washed with saturated saline and dried over anhydrous magnesium sulfate. The solvent was distilled off under reduced pressure, followed by elution by reverse-phase column chromatography (water/methanol=80/20) to obtain compound RE1-4 (0.3879 g, yield: 37%).

[0516] ESI-MS m/z: 490 (M+H)⁺;

[0517] ¹H-NMR (DMSO-D₆) δ: 1.46-1.52 (4H, m), 1.78 (3H, s), 1.90 (3H, s), 2.00 (3H, s), 2.08 (2H, t, J=7.4 Hz), 2.11 (3H, s), 2.85 (2H, t, J=6.3 Hz), 3.27 (2H, dd, J=12.3, 6.2 Hz), 3.67-3.69 (1H, m), 3.68-3.73 (1H, m), 3.86-3.90 (1H, m), 4.01-4.04 (3H, m), 4.49 (1H, d, J=8.4 Hz), 4.97 (1H, dd, J=11.3, 3.4 Hz), 5.22 (1H, d, J=3.5 Hz), 7.86 (1H, d, J=9.1 Hz), 7.95-8.02 (1H, m).

### Reference Example 2

[chemical structure]

[0519] Step 1 of Reference Example 2

[0520] (9H-Fluoren-9-yl)methyl ((2R,3R)-1,3-dihydroxybutan-2-yl)carbamate (compound RE2-1, manufactured by Chem-Impex International, Inc., 1.50 g, 4.58 mmol) was dissolved in pyridine (20 mL). To the solution, 4,4′-dimethoxytrityl chloride (manufactured by Tokyo Chemical Industry Co., Ltd., 1.71 g, 5.04 mmol) was added under ice cooling, and then, the mixture was stirred at room temperature for 2 hours. The reaction solution was ice-cooled, and a 10% aqueous citric acid solution was added thereto, followed by extraction with ethyl acetate. Then, the organic layer was washed with saturated saline and dried over anhydrous magnesium sulfate. The solvent was distilled off under reduced pressure, and the residue was purified by silica gel column chromatography (hexane/ethyl acetate=90/10) to obtain compound RE2-2 (1.07 μg, yield: 37%).

[0521] ESI-MS m/z: 630 (M+H)+

[0522] Step 2 of Reference Example 2

[0523] Compound RE2-2 (1.07 g, 1.699 mmol) synthesized in step 1 of Reference Example 2 was dissolved in N,N-dimethylformamide (10 mL). To the solution, piperidine (0.336 mL, 3.40 mmol) was added at room temperature, and the mixture was stirred for 3 hours. Water was added to the reaction solution, followed by extraction with ethyl acetate. Then, the organic layer was washed with saturated saline and dried over anhydrous magnesium sulfate. The solvent was distilled off under reduced pressure, and the residue was purified by amino silica gel column chromatography (chloroform/methanol=90/10) to obtain compound RE2-3 (0.59 g, yield: 85%).

[0524] ESI-MS m/z: 408 (M+H)+

### Reference Example 3

[chemical structure]

[chemical structure]

[chemical structure]

[0526] Step 1 of Reference Example 3

[0527] Dimethyl 5-hydroxyisophthalate (compound RE3-1, manufactured by Wako Pure Chemical Industries, Ltd., 5.0443 g, 24 mmol) was dissolved in tetrahydrofuran (manufactured by Wako Pure Chemical Industries, Ltd., 25 mL). To the solution, 2-(tert-butoxycarbonylamino)-1-ethanol (manufactured by Tokyo Chemical Industry Co., Ltd., 4.0343 g, 25.03 mmol), and polymer-supported triphenylphosphine (manufactured by Sigma-Aldrich Co. LLC, 6.61 g, 25.2 mmol) were added, then a 40% solution of diisopropyl azodicarboxylate (DIAD) in toluene (manufactured by Tokyo Chemical Industry Co., Ltd., 13.26 mL, 25.2 mmol) was added under ice cooling, and the mixture was stirred overnight at room temperature. The reaction solution was filtered, and the solvent in the filtrate was distilled off under reduced pressure. Then, the residue was purified by amino silica gel column chromatography (hexane/ethyl acetate=95/5 to 80/20) to obtain compound RE3-2 (5.3071 g, yield: 63%).

[0528] ESI-MS m/z: 254 (M+H)⁺, detected as a Boc-deprotected form

[0529] Step 2 of Reference Example 3

[0530] Compound RE3-2 (5.3071 g, 15.02 mmol) synthesized in step 1 of Reference Example 3 was dissolved in methanol (25 mL). To the solution, a 2 mol/L aqueous sodium hydroxide solution (manufactured by Wako Pure Chemical Industries, Ltd., 13 mL) was added under ice cooling, and the mixture was stirred at room temperature for 4 hours. The reaction solution was ice-cooled, and a 10% aqueous citric acid solution was added thereto, followed by extraction with ethyl acetate. Then, the organic layer was washed with saturated saline and dried over anhydrous magnesium sulfate. The solvent was distilled off under reduced pressure to quantitatively obtain compound RE3-3.

[0531] ESI-MS m/z: 324 (M−H)⁻

[0532] Step 3 of Reference Example 3

[0533] Compound RE3-3 (1.9296 g, 5.93 mmol) synthesized in step 2 of Reference Example 3 was dissolved in N,N′-dimethylformamide (70 mL). To the solution, N-1-(9H-fluoren-9-ylmethoxycarbonyl)-ethylenediamine hydrochloride (3.3493 g, 11.86 mmol), diisopropylethylamine (5.18 mL, 29.7 mmol), and 2-(1H-benzotriazol-1-yl)-1,1,3,3-tetramethyluronium hexafluorophosphate (4.5168 g, 11.88 mmol) were added, and the mixture was stirred at room temperature for 4 hours. The reaction solution was ice-cooled, and a 10% aqueous citric acid solution was added thereto, followed by extraction with chloroform. Then, the organic layer was washed with a saturated aqueous solution of sodium bicarbonate and saturated saline and dried over anhydrous magnesium sulfate. The solvent was distilled off under reduced pressure, and the residue was purified by silica gel column chromatography (chloroform/methanol) to obtain compound RE3-4 (3.4407 g, yield: 68%).

[0534] ESI-MS m/z: 898 (M+HCOO)⁻

[0535] Step 4 of Reference Example 3

[0536] Compound RE3-4 (1.6087 g, 1.884 mmol) synthesized in step 3 of Reference Example 3 was dissolved in dichloromethane (20 mL). To the solution, trifluoroacetic acid (5 mL, 64.9 mmol) was added under ice cooling, and the mixture was stirred at room temperature for 4 hours. The solvent in the reaction solution was distilled off under reduced pressure to quantitatively obtain compound RE3-5 (2.4079 g).

[0537] ESI-MS m/z: 798 (M+HCOO)⁻

[0538] Step 5 of Reference Example 3

[0539] Compound RE3-5 (386 mg, 0.512 mmol) synthesized in step 4 of Reference Example 3 was dissolved in tetrahydrofuran (10 mL). To the solution, benzoyl chloride (175 mg, 1.024 mmol) was added under ice cooling, and the mixture was stirred at room temperature for 1 hour. The solvent in the reaction solution was distilled off under reduced pressure, and the residue was purified by silica gel column chromatography (chloroform/methanol) to obtain compound RE3-6 (373 mg, yield: 82%).

[0540] ESI-MS m/z: 888 (M+H)⁺

[0541] Step 6 of Reference Example 3

[0542] Compound RE3-6 (108 mg, 0.122 mmol) synthesized in step 5 of Reference Example 3 was dissolved in dichloromethane (5 mL). To the solution, diethylamine (0.5 mL, 4.8 mmol) was added at room temperature, and the mixture was stirred for 1 hour. The solvent was distilled off under reduced pressure to quantitatively obtain compound RE3-7 (54.9 mg).

[0543] ESI-MS m/z: 444 (M+H)⁺

[0544] Step 7 of Reference Example 3

[0545] Compound RE3-7 (180 mg, 0.406 mmol) synthesized in step 6 of Reference Example 3, Ncα,Nε-bis(tert-butoxycarbonyl)-L-lysine (manufactured by Novabiochem/Merck Millipore, 295 mg, 0.852 mmol), diisopropylethylamine (0.354 mL, 2.029 mmol), and 2-(1H-benzotriazol-1-yl)-1,1,3,3-tetramethyluronium hexafluorophosphate (324 mg, 0.852 mmol) were added, and the mixture was stirred overnight at room temperature. The reaction solution was ice-cooled, and a 10% aqueous citric acid solution was added thereto, followed by extraction with chloroform. Then, the organic layer was washed with saturated saline and dried over anhydrous magnesium sulfate. The solvent was distilled off under reduced pressure, and the residue was purified by amino silica gel column chromatography (chloroform/methanol) to quantitatively obtain compound RE3-8 (450 mg).

[0546] ESI-MS m/z: 1101 (M+H)⁺

[0547] Step 8 of Reference Example 3

[0548] Compound RE3-8 (2.1558 g, 1.9593 mmol) synthesized in step 7 of Reference Example 3 was dissolved in dichloromethane (20 mL). To the solution, trifluoroacetic acid (5 mL) was added under ice cooling, and the mixture was stirred at room temperature for 4 hours. The solvent in the reaction solution was distilled off under reduced pressure to quantitatively obtain compound RE3-9.

[0549] ESI-MS m/z: 700 (M+H)⁺

### Reference Example 4

[chemical structure]

[chemical structure]

wherein Bn represents a benzyl group.

[0551] Step 1 of Reference Example 4

[0552] Compound RE4-1 (compound RE3-5 in Reference Example 3, 0.5716 g, 0.7582 mmol) synthesized by the method described in Reference Example 3, dodecanoic acid monobenzyl ester (0.4859 g, 1.5164 mmol) synthesized by the method described in Bioconjugate Chemistry, Vol. 22, p. 690-699, 2011, diisopropylethylamine (0.662 mL, 3.79 mmol), and 2-(1H-benzotriazol-1-yl)-1,1,3,3-tetramethyluronium hexafluorophosphate (0.5766 g, 1.516 mmol) were dissolved in N,N-dimethylformamide (12 mL). The solution was stirred at room temperature for 1 hour. The reaction solution was ice-cooled, and a saturated aqueous solution of citric acid was added thereto, followed by extraction with chloroform. Then, the organic layer was washed with saturated saline and dried over anhydrous magnesium sulfate. The solvent was distilled off under reduced pressure, and the residue was purified by silica gel column chromatography (chloroform/methanol) to obtain compound RE4-2 (0.88 g, yield: 84%)

[0553] ESI-MS m/z: 1057 (M+H)⁺

[0554] Step 2 of Reference Example 4

[0555] Compound RE4-2 (0.7545 g, 0.714 mmol) synthesized in step 1 of Reference Example 4 was dissolved in a mixed solvent of dichloromethane and tetrahydrofuran (20 mL). To the solution, diethylamine (5 mL, 47.9 mmol) was added at room temperature, and the mixture was stirred overnight. The solvent was distilled off under reduced pressure to quantitatively obtain compound RE4-3.

[0556] ESI-MS m/z: 612 (M+H)⁺

[0557] Step 3 of Reference Example 4

[0558] Compound RE4-3 (0.437 g, 0.7143 mmol) synthesized in step 2 of Reference Example 4, Ncα,Nε-bis(tert-butoxycarbonyl)-L-lysine (manufactured by Novabiochem/Merck Millipore, 0.5483 g, 1.583 mmol), diisopropylethylamine (0.624 mL, 3.57 mmol), and 2-(1H-benzotriazol-1-yl)-1,1,3,3-tetramethyluronium hexafluorophosphate (0.5703 g, 1.5 mmol) were added, and the mixture was stirred room at temperature for 2 hours. A 10% aqueous citric acid solution was added to the reaction solution, followed by extraction with ethyl acetate. Then, the organic layer was washed with saturated saline and dried over anhydrous magnesium sulfate. The solvent was distilled off under reduced pressure to obtain a crude product of compound RE4-4.

[0559] ESI-MS m/z: 1269 (M+H)⁺

[0560] Step 4 of Reference Example 4

[0561] Compound RE4-4 (0.906 g, 0.7143 mmol) synthesized in step 3 of Reference Example 4 was dissolved in dichloromethane (12 mL). To the solution, trifluoroacetic acid (3 mL, 38.9 mmol) was added under ice cooling, and the mixture was stirred at room temperature for 4 hours. The solvent in the reaction solution was distilled off under reduced pressure to obtain a crude product of compound RE4-5.

[0562] ESI-MS m/z: 869 (M+H)⁺

### Reference Example 5

[chemical structure]

[chemical structure]

[0564] Step 1 of Reference Example 5

[0565] Compound RE5-1 (RE3-8 in Reference Example 3, 100 mg, 0.091 mmol) synthesized by the method described in Reference Example 3 was dissolved in methanol (3 mL). To the solution, acetic acid (2 μL) was added, followed by catalytic hydrogen reduction using palladium/carbon. The solvent in the obtained solution fraction was distilled off under reduced pressure to quantitatively obtain compound RE5-2.

[0566] ESI-MS m/z: 967 (M+H)⁺

[0567] Step 2 of Reference Example 5

[0568] Compound RE5-2 (50 mg, 0.052 mmol) and N-(6-maleimidocaproyloxy)succinimide (48 mg, 0.155 mmol) were dissolved in tetrahydrofuran (2 mL). To the solution, diisopropylethylamine (0.045 mL, 0.259 mmol) was added, and the mixture was stirred overnight at room temperature. The solvent was distilled off under reduced pressure, and the residue was purified by silica gel column chromatography (chloroform/methanol) to obtain compound RE5-3 (18 mg, yield: 30%).

[0569] ESI-MS m/z: 1160 (M+H)⁺

[0570] Step 3 of Reference Example 5

[0571] Compound RE5-3 (18 mg, 0.016 mmol) synthesized in step 2 of Reference Example 5 was dissolved in dichloromethane (2 mL). To the solution, trifluoroacetic acid (0.2 mL, 2.6 mmol) was added under ice cooling, and the mixture was stirred overnight at room temperature. The solvent in the reaction solution was distilled off under reduced pressure, and the residue was crystallized from diethyl ether to obtain compound RE5-4 (7.5 mg, yield: 64%) as a white solid.

[0572] ESI-MS m/z: 759 (M+H)⁺

### Reference Example 6

[chemical structure]

[chemical structure]

[chemical structure]

[0574] Step 1 of Reference Example 6

[0575] Compound RE6-2 was quantitatively obtained in the same way as in step 3 of Reference Example 3 using compound RE6-1 (compound RE3-2 in Reference Example 3, 0.9372 g, 2.8809 mmol) synthesized by the method described in Reference Example 3 and β-alanine methyl ester hydrochloride (manufactured by Tokyo Chemical Industry Co., Ltd., 0.8082 g, 5.7902 mmol).

[0576] ESI-MS m/z: 495 (M+H)⁺

[0577] Step 2 of Reference Example 6

[0578] Compound RE6-3 was quantitatively obtained in the same way as in step 4 of Reference Example 3 using compound RE6-2 (0.9622 g, 1.952 mmol) synthesized in step 1 of Reference Example 6.

[0579] ESI-MS m/z: 396 (M+H)⁺

[0580] Step 3 of Reference Example 6

[0581] Compound RE6-4 was quantitatively obtained in the same way as in step 2 of Reference Example 5 using compound RE6-3 (0.1146 g, 0.290 mmol) synthesized in step 2 of Reference Example 6 and N-succinimidyl 15-azido-4,7,10,13-tetraoxapentadecanoic acid (N3-PEG4-NHS, manufactured by Tokyo Chemical Industry Co., Ltd., 0.0750 g, 0.1931 mmol).

[0582] ESI-MS m/z: 669 (M+H)⁺

[0583] Step 4 of Reference Example 6

[0584] Compound RE6-5 was quantitatively obtained in the same way as in step 2 of Reference Example 3 using compound RE6-4 (0.1291 g, 0.193 mmol) synthesized in step 3 of Reference Example 6.

[0585] ESI-MS m/z: 641 (M+H)⁺

[0586] Step 5 of Reference Example 6

[0587] Compound RE6-6 (0.0521 g, yield: 24%) was obtained in the same way as in step 3 of Reference Example 3 using compound RE6-5 (0.1252 g, 0.193 mmol) synthesized in step 4 of Reference Example 6 and L-glutamic acid di-tert-butyl ester (manufactured by Watanabe Chemical Industries, Ltd., 0.1180 g, 0.399 mmol).

[0588] ESI-MS m/z: 1124 (M+H)⁺

[0589] Step 6 of Reference Example 6

[0590] Compound RE6-7 (36 mg, yield: 86%) was obtained in the same way as in step 4 of Reference Example 3 using compound RE6-6 (0.0521 g, 0.0464 mmol) synthesized in step 5 of Reference Example 6.

[0591] ESI-MS m/z: 899 (M+H)⁺

### Reference Example 7

[chemical structure]

[chemical structure]

[0593] Step 1 of Reference Example 7

[0594] Compound RE7-2 (0.5272 g, yield: 61%) was obtained in the same way as in step 3 of Reference Example 3 using compound RE7-1 (RE3-9 in Reference Example 3, 0.2586 g, 0.3695 mmol) synthesized by the method described in Reference Example 3 and compound RE-1 (0.8559 g, 1.7927 mmol) of Reference Example 1 synthesized by the method described in Journal of American Chemical Society, Vol. 136, p. 16958-16961, 2014.

[0595] ESI-MS m/z: 2418 (M+H)⁺

[0596] Step 2 of Reference Example 7

[0597] Compound RE7-3 (0.1524 g, yield: 61%) was obtained in the same way as in step 1 of Reference Example 5 using compound RE7-2 (0.2653 g, 0.1097 mmol) synthesized in step 1 of Reference Example 7.

[0598] ESI-MS m/z: 2284 (M+H)⁺

### Reference Example 8: Synthesis of Compounds A1 and B1

[chemical structure]

[0600] Synthesis of Compound A1

[0601] Compound A1 (0.0077 g, yield: 47%) was obtained in the same way as in step 2 of Reference Example 5 using compound RE8-1 (compound RE7-3 in Reference Example 7, 0.0152 g, 0.006657 mmol) synthesized by the method described in Reference Example 7.

[0602] ESI-MS m/z: 1239 (M+2H)²⁺

[0603] ¹H-NMR (DMSO-D₆) δ: 1.11-1.66 (34H, m), 1.77 (12H, d, J=1.5 Hz), 1.89 (12H, s), 2.01-2.14 (10H, m), 2.01 (12H, s), 2.10 (12H, s), 2.92-2.99 (4H, m), 3.16-3.54 (14H, m), 3.65-3.74 (4H, m), 3.81-3.91 (4H, m), 3.98-4.08 (14H, m), 4.11-4.24 (4H, m), 4.48 (4H, dd, J=8.4, 1.8 Hz), 4.93-5.00 (4H, m), 5.21 (4H, d, J=3.5 Hz), 6.99 (2H, s), 7.52 (2H, s), 7.66-7.75 (2H, m), 7.78-7.87 (6H, m), 7.91 (1H, br s), 8.01-8.08 (3H, br m), 8.54-8.60 (2H, br m).

[0604] Synthesis of Compound B1

[0605] Compound B1 (0.0062 g, yield: 37%) was obtained in the same way as in step 3 of Reference Example 3 using compound RE8-1 (compound RE7-3 in Reference Example 7, 0.0150 g, 0.00657 mmol).

[0606] ESI-MS m/z: 1279 (M+2H)²⁺

[0607] ¹H-NMR (DMSO-D₆) δ: 1.11-1.66 (30H, m), 1.77 (12H, s), 1.89 (12H, s), 2.01-2.14 (8H, m), 2.01 (12H, s), 2.10 (12H, s), 2.33-2.38 (2H, m), 2.92-2.99 (4H, m), 3.16-3.54 (14H, m), 3.58-3.63 (16H, m), 3.65-3.74 (4H, m), 3.81-3.91 (4H, m), 3.98-4.08 (12H, m), 4.11-4.24 (4H, m), 4.48 (4H, dd, J=8.4, 1.8 Hz), 4.93-5.00 (4H, m), 5.21 (4H, d, J=3.5 Hz), 7.52 (2H, s), 7.66-7.75 (2H, m), 7.78-7.87 (6H, m), 7.91 (1H, br s), 8.01-8.08 (3H, br m), 8.54-8.60 (2H, br m).

### Reference Example 9: Synthesis of Compounds B2 and B3

[chemical structure]

[chemical structure]

[0609] Synthesis of Compound B2

[0610] A crude product of compound B2 was obtained in the same wav as in step 3 of Reference Example 3 using compound RE9-1 (compound RE6-5 in Reference Example 6, 0.00436 g, 0.00681 mmol) synthesized by the method described in Reference Example 6 and compound RE1-4 (0.010 g, 0.020 mmol) of Reference Example 1.

[0611] ESI-MS m/z: 1584 (M+H)⁺

[0612] Synthesis of Compound B3

[0613] Compound B3 (0.0223 g, yield: 72%) was obtained in the same way as in step 3 of Reference Example 3 using compound RE9-2 (compound RE6-7 in Reference Example 6, 0.0100 g, 0.01112 mmol) synthesized by the method described in Reference Example 6.

[0614] ESI-MS m/z: 1393 (M+2H)²⁺

### Reference Example 10: Synthesis of Compounds C1 and D1

[chemical structure]

[chemical structure]

[0616] Step 1 of Reference Example 10

[0617] Compound RE10-2 (334.8 mg, yield: 58%) was obtained in the same way as in step 3 of Reference Example 3 using compound RE10-1 (compound RE4-5 in Reference Example 4, 0.1952 μg, 0.225 mmol) synthesized by the method described in Reference Example 4 and compound RE1-1 (0.4162 μg, 0.93 mmol) of Reference Example 1 synthesized by the method described in Journal of American Chemical Society, Vol. 136, p. 16958-16961, 2014.

[0618] ESI-MS m/z: 1294 (M+2H)²⁺

[0619] Step 2 of Reference Example 10

[0620] Compound D1 (112 mg, yield: 80%) was obtained in the same way as in step 1 of Reference Example 5 using compound RE10-2 (0.1459 g, 0.056 mmol) synthesized in step 1 of Reference Example 10.

[0621] ESI-MS m/z: 1249 (M+2H)²⁺¹H-NMR (DMSO-D₆) δ: 1.11-1.66 (44H, m), 1.77 (12H, d, J=1.5 Hz), 1.89 (12H, s), 2.01-2.20 (12H, m), 2.01 (12H, s), 2.10 (12H, s), 2.92-2.99 (4H, m), 3.16-3.54 (10H, m), 3.58-3.64 (4H, m), 3.65-3.74 (4H, m), 3.81-3.91 (4H, m), 3.98-4.08 (12H, m), 4.11-4.24 (4H, m), 4.48 (4H, dd, J=8.4, 1.8 Hz), 4.93-5.00 (4H, m), 5.21 (4H, d, J=3.5 Hz), 6.99 (2H, s), 7.52 (2H, s), 7.66-7.75 (2H, m), 7.78-7.87 (6H, m), 7.91 (1H, br s), 8.01-8.08 (3H, br m), 8.54-8.60 (2H, br m).

[0622] Step 3 of Reference Example 10

[0623] Compound RE10-3 was obtained as a crude product in the same way as in step 3 of Reference Example 3 using compound D1 (0.1091 g, 0.044 mmol) synthesized in step 2 of Reference Example 10 and compound RE2-3 (0.0748 g, 0.184 mmol) of Reference Example 2.

[0624] ESI-MS m/z: 1292 (M+2H)²⁺, detected as a DMTr-deprotected form

[0625] Step 4 of Reference Example 10

[0626] Compound RE10-3 (0.161 g, 0.05586 mmol) synthesized in step 3 of Reference Example 10 was dissolved in dichloromethane (5 mL). To the solution, succinic anhydride (manufactured by Tokyo Chemical Industry Co., Ltd., 0.1182 g, 1.181 mmol), N,N-dimethylaminopyridine (0.0224 g, 0.183 mmol), and triethylamine (0.55 mL, 3.95 mmol) were added, and the mixture was stirred overnight at room temperature. The reaction solution was ice-cooled, and water was added thereto, followed by extraction with ethyl acetate twice. Then, the organic layer was washed with saturated saline and dried over anhydrous magnesium sulfate. The solvent was distilled off under reduced pressure to obtain a crude product of compound RE10-4.

[0627] ESI-MS m/z: 1342 (M+2H)²⁺, detected as a DMTr-deprotected form

[0628] Step 5 of Reference Example 10

[0629] Compound RE10-4 (0.0816 g, 0.02734 mmol) synthesized in step 4 of Reference Example 10, 0-(benzotriazol-1-yl)-N,N,N′,N′-tetramethyluronium hexafluorophosphate (0.0221 g, 0.05827 mmol), and diisopropylethylamine (0.02 mL, 0.1094 mmol) were dissolved in N,N-dimethylformamide (4 mL). To the solution, LCAA-CPG (manufactured by ChemGenes Corp., 0.4882 g) was added, and the mixture was stirred overnight at room temperature. The mixture was collected by filtration, washed with dichloromethane, a 10% solution of methanol in dichloromethane, and diethyl ether in this order and then allowed to act on a solution of acetic anhydride in pyridine to obtain compound C1 (49.5 μmol/g, yield: 89%). The yield was calculated from the rate of introduction to a solid-phase support which can be calculated from absorption derived from a DMTr group by adding a 1% solution of trifluoroacetic acid in dichloromethane to the form supported by the solid phase.

### Reference Example 11

[chemical structure]

[0631] Compound RE11-2 (1.050 g, yield: 50%) was synthesized from compound RE11-1 (1.200 g, 3.640 mmol) by the method described in Journal of Medicinal Chemistry, Vol. 59, p. 2718-2733, 2016.

[0632] ESI-MS m/z: 582 (M+H)⁺

### Reference Example 12

[chemical structure]

[0634] Compound RE12-1 (4.000 g, 10.27 mmol) was dissolved in dichloromethane (60 mL). To the solution, benzyl-2-(2-hydroxyethoxy)ethyl carbamate (2.700 g, 11.30 mmol) and trifluoromethanesulfonic acid (0.1360 mL, 1.541 mmol) were added, and the mixture was stirred overnight under reflux conditions. A 10 wt % aqueous potassium carbonate solution was added to the reaction solution, and the mixture was separated into aqueous and organic layers with dichloromethane. Then, the organic layer was washed with water and dried over anhydrous sodium sulfate. The solvent was distilled off under reduced pressure, and the residue was solvent-replaced with 2-methyltetrahydrofuran and concentrated. The residue was added dropwise to heptane, and the obtained crystals were filtered to obtain compound RE12-2 (5.130 g, yield: 88%).

[0635] ESI-MS m/z: 570 (M+H)⁺

### Reference Example 13

[chemical structure]

[0637] Compound RE13-1 (compound RE1-1 in Reference Example 1, 898.0 mg, 2.007 mmol) was dissolved in dichloromethane (15 mL). To the solution, 1-hydroxybenzotriazole monohydrate (338.0 mg, 2.208 mmol), 1-(3-dimethylaminopropyl)-3-ethylcarbodiimide hydrochloride (343 mg, 2.208 mmol), and N-1-Z-1,3-diaminopropane hydrochloride (0.4910 mL, 2.208 mmol) were added, and the mixture was stirred at room temperature for 3 hours. Water was added to the reaction solution, and the mixture was separated into aqueous and organic layers with dichloromethane. Then, the organic layer was washed with a saturated aqueous solution of sodium bicarbonate and dried over anhydrous sodium sulfate. The solvent was distilled off under reduced pressure, and the residue was purified by silica gel column chromatography (chloroform/methanol=90/10) to obtain compound RE13-2 (873.0 mg, yield: 68%).

[0638] ESI-MS m/z: 639 (M+H)⁺

### Reference Example 14

[chemical structure]

[0640] Step 1 of Reference Example 14

[0641] Compound RE14-1 (compound RE1-1 in Reference Example 1, 3.00 g, 6.70 mmol) was dissolved in dichloromethane (60 mL). To the solution, L-lysine benzyl ester di-p-toluenesulfonate (1.75 g, 3.02 mmol), triethylamine (0.935 mL, 6.70 mmol), 1-(3-dimethylaminopropyl)-3-ethylcarbodiimide hydrochloride (1.29 g, 6.70 mmol), and 1-hydroxybenzotriazole monohydrate (103 mg, 0.670 mmol) were added at room temperature, and the mixture was stirred for 2.5 hours. The reaction solution was washed with water and a saturated aqueous solution of sodium bicarbonate and dried over anhydrous sodium sulfate. The solvent was distilled off under reduced pressure, and the residue was purified by silica gel column chromatography (chloroform/methanol=90/10) to quantitatively obtain compound RE14-2.

[0642] ESI-MS m/z: 1096 (M+H)⁺

[0643] Step 2 of Reference Example 14

[0644] Compound RE14-2 (2.30 g, 2.10 mmol) was dissolved in tetrahydrofuran (46 mL). To the solution, a 10% palladium-carbon powder (water-containing product, 54.29%; 424 mg) was added at room temperature, and the mixture was stirred overnight in a hydrogen atmosphere. The reaction solution was filtered, and the solvent was distilled off under reduced pressure to quantitatively obtain compound RE14-3.

[0645] ESI-MS m/z: 1006 (M+H)⁺

### Reference Example 15

[chemical structure]

[0647] Step 1 of Reference Example 15 Iminodiacetic acid (manufactured by Tokyo Chemical Industry Co., Ltd., 1.5 g, 6.43 mmol) was dissolved in methylene chloride (30 mL). To the solution, pentafluorotrifluoroacetic acid (manufactured by Tokyo Chemical Industry Co., Ltd., 2.75 mL, 16.08 mmol) and triethylamine (4.48 mL, 32.2 mmol) were added, and the mixture was stirred for 4 hours. A 10% aqueous citric acid solution was added to the reaction solution, followed by extraction with chloroform. Then, the organic layer was washed with saturated saline and dried over anhydrous magnesium sulfate. A solution of compound RE15-1 (compound RE11-2 in Reference Example 11, 2 g, 3.45 mmol) synthesized by the method described in Reference Example 11, dissolved in a mixed solution of ethyl acetate (10 mL) and acetonitrile (10 mL) was added to the residue, followed by catalytic hydrogen reduction using palladium/carbon. The solvent in the obtained solution portion was distilled off under reduced pressure to obtain a crude product of compound RE15-2.

[0648] ESI-MS m/z: 1091 (M+H)⁺

[0649] Step 2 of Reference Example 15

[0650] Compound RE15-3 was quantitatively obtained in the same way as in step 3 of Reference Example 1 using compound RE15-2 (1.5 g, 1.37 mmol).

[0651] ESI-MS m/z: 990 (M+H)⁺

### Reference Example 16

[chemical structure]

[0653] Step 1 of Reference Example 16

[0654] A crude product of compound RE16-2 was obtained in the same way as in step 1 of Reference Example 15 using N-(t-butoxycarbonyl)-L-glutamic acid (manufactured by Tokyo Chemical Industry Co., Ltd.) and compound RE16-1 (1.855 g, 3.19 mmol) synthesized by the method described in Reference Example 11.

[0655] ESI-MS m/z: 1105 (M+H)⁺

[0656] Step 2 of Reference Example 16

[0657] Compound RE16-3 was quantitatively obtained in the same way as in step 3 of Reference Example 1 using compound RE16-2 (1.421 g, 1.2866 mmol).

[0658] ESI-MS m/z: 1004 (M+H)⁺

### Reference Example 17

[chemical structure]

[0660] Compound RE17-1 (90 mg, 0.173 mmol) synthesized by the method described in Journal of Organic Chemistry, Vol. 74, p. 6837-6842, 2009 was dissolved in tetrahydrofuran (1 mL). To the solution, polymer-supported triphenylphosphine (manufactured by Sigma-Aldrich Co. LLC, 63 mg, 0.189 mmol) was added, and the mixture was stirred for 3 hours under heating to reflux. The reaction solution was filtered, and the solvent was distilled off under reduced pressure to obtain compound RE17-2 (70 mg, yield: 82%).

[0661] ESI-MS m/z: 516 (M+Na)⁺

[0662] ¹H-NMR (400 MHz, CDCl₃): δ 0.89 (3H, s), 1.42-1.48 (2H, m), 1.52-1.61 (2H, m), 1.85 (1H, br s), 2.68 (2H, t, J=7.2 Hz), 3.06-3.07 (2H, m), 3.39-3.44 (3H, m), 3.51-3.55 (3H, m), 3.78 (6H, s), 6.80-6.85 (4H, m), 7.17-7.23 (1H, m), 7.27-7.33 (6H, m), 7.41-7.43 (2H, m).

### Reference Example 18

[chemical structure]

[0664] Step 1 of Reference Example 18

[0665] A crude product of compound RE18-2 (1.5 g) was obtained in the same way as in step 1 of Reference Example 2 using compound RE18-1 (manufactured by Tokyo Chemical Industry Co., Ltd., 0.500 g, 3.73 mmoL).

[0666] ESI-MS m/z: 435 (M−H)⁻

[0667] Step 2 of Reference Example 18

[0668] Compound RE18-3 (0.18 g, 2-step yield: 10%) was obtained in the same way as in step 3 of Reference Example 3 using a crude product of compound RE18-2 (1.5 g) and 1,4-diaminobutane (manufactured by Tokyo Chemical Industry Co., Ltd., 3.29 g, 37.3 mmol).

[0669] ESI-MS m/z: 551 (M+HCOO)⁻

[0670] ¹H-NMR (400 MHz, MeOD): δ 1.09 (3H, s), 1.45-1.52 (4H, m), 2.80 (2H, t, J=7.2 Hz), 2.91 (2H, s), 3.05 (1H, d, J=8.8 Hz), 3.12-3.16 (4H, m), 3.24 (1H, s), 3.43 (1H, d, J=10.8 Hz), 3.62-3.66 (7H, m), 6.71-6.76 (4H, m), 7.05-7.11 (1H, m), 7.12-7.20 (6H, m), 7.28-7.32 (2H, m).

### Reference Example 19

[chemical structure]

[0672] Compound RE19-1 (110 mg, 0.212 mmol) synthesized by the method described in Journal of Organic Chemistry, Vol. 74, p. 6837-6842, 2009 was dissolved in tetrahydrofuran (2 mL). To the solution, N-(1R,8S,9s)-bicyclo[6.1.0]non-4-yn-9-ylmethyloxycarbonyl-1,8-diamino-3,6-dioxaoctane (manufactured by Tokyo Chemical Industry Co., Ltd., 72 mg, 0.222 mmol) was added, and the mixture was stirred at room temperature for 1 hour. Water was added to the reaction solution, followed by extraction with chloroform. Then, the organic layer was washed with saturated saline and dried over anhydrous magnesium sulfate. The solvent was distilled off under reduced pressure, and the residue was purified by amino silica gel column chromatography (chloroform/methanol=90/10) to obtain compound RE19-2 (160 mg, yield: 90%). ESI-MS m/z: 845 (M+H)⁺

[0673] ¹H-NMR (400 MHz, CDCl₃): δ 0.88 (3H, s), 0.91-1.09 (3H, m), 1.20-1.25 (1H, m), 1.52-1.59 (4H, m), 1.80-1.85 (2H, m), 2.19-2.25 (4H, m), 2.59-2.68 (1H, m), 2.84-2.90 (4H, m), 3.02-3.11 (3H, m), 3.35-3.44 (5H, m), 3.49-3.53 (5H, m), 3.54-3.58 (2H, m), 3.62 (5H, s), 3.78 (6H, s), 4.13 (2H, d, J=6.4 Hz), 4.21 (2H, t, J=7.2 Hz), 6.79-6.84 (4H, m), 7.18-7.21 (1H, m), 7.24-7.27 (2H, m), 7.28-7.32 (4H, m), 7.39-7.44 (2H, m).

### Reference Example 20

[chemical structure]

[0675] Step 1 of Reference Example 20

[0676] Compound RE20-2 (410 mg, yield: 70%) was obtained in the same way as in step 3 of Reference Example 3 using compound RE20-1 (manufactured by AstaTech Inc., 100 mg, 1.148 mmol) and Fmoc-Ser(tBuMe2Si)—OH (manufactured by Watanabe Chemical Industries, Ltd., 532 mg, 1.205 mmol).

[0677] ESI-MS m/z: 511 (M+H)⁺

[0678] ¹H-NMR (400 MHz, CDCl₃): δ 0.06 (6H, s), 0.90 (9H, s), 2.76-2.85 (1H, m), 3.65-3.86 (5H, m), 4.02-4.23 (3H, m), 4.32-4.40 (4H, m), 5.55 (1H, d, J=8.0 Hz), 7.31 (2H, t, J=7.6 Hz), 7.40 (2H, t, J=7.6 Hz), 7.59 (2H, d, J=7.6 Hz), 7.76 (2H, d, J=7.6 Hz).

[0679] Step 2 of Reference Example 20

[0680] A crude product of compound RE20-3 (680 mg) was obtained in the same way as in step 1 of Reference Example 2 using compound RE20-2 (410 mg, 0.803 mmol).

[0681] ESI-MS m/z: 814 (M+H)⁺

[0682] Step 3 of Reference Example 20

[0683] Compound RE20-4 (330 mg, 2-step yield: 70%) was obtained in the same way as in step 5 of Reference Example 2 using a crude product of compound RE20-3 (680 mg).

[0684] ESI-MS m/z: 519 (M+H)⁺

[0685] ¹H-NMR (400 MHz, CDCl₃): δ 0.02-0.09 (6H, m), 0.89 (9H, d, J=28.8 Hz), 2.84-2.94 (1H, m), 3.24-3.30 (2H, m), 3.46 (1H, t, J=7.2 Hz), 3.52-3.68 (2H, m), 3.75-3.80 (1H, m), 3.82 (6H, d, J=2.4 Hz), 3.89-3.96 (1H, m), 4.05-4.17 (1H, m), 4.27-4.37 (1H, m), 6.82-6.89 (4H, m), 7.22-7.27 (1H, m), 7.29-7.34 (6H, m), 7.41-7.45 (2H, m)

### Reference Example 21

[chemical structure]

[0687] Step 1 of Reference Example 21

[0688] N-(tert-Butoxycarbonyl)-1,3-diaminopropane (manufactured by Tokyo Chemical Industry Co., Ltd., 1.788 g, 10.26 mmol) was dissolved in dichloromethane (22.8 mL). To the solution, triethylamine (1.907 mL, 13.68 mmol) was added, and the mixture was stirred at room temperature for 15 minutes. A solution of compound RE21-1 (1.126 g, 6.84 mmol) synthesized by the method described in Organic Letter, Vol. 16, p. 6318-6321, 2014 in dichloromethane (5 mL) was added dropwise to the reaction solution, and the mixture was stirred at room temperature for 2 hours. Water was added to the reaction solution, followed by extraction with chloroform. Then, the organic layer was washed with saturated saline and dried over anhydrous magnesium sulfate. The solvent was distilled off under reduced pressure, and the residue was purified by silica gel column chromatography (heptane/ethyl acetate=35/65) to obtain compound RE21-2 (1.65 g, yield: 80%).

[0689] ESI-MS m/z: 303 (M+H)⁺

[0690] Step 2 of Reference Example 21

[0691] Compound RE21-3 (1.10 g, yield: 100%) was obtained in the same way as in step 2 of Reference Example 1 using compound RE21-2 (1.65 g, 5.46 mmol).

[0692] ESI-MS m/z: 203 (M+H)⁺

[0693] ¹H-NMR (400 MHz, CDCl₃): δ 1.74 (2H, dt, J=12.0, 6.0 Hz), 2.95 (2H, t, J=6.0 Hz), 3.18 (1H, s), 3.60 (2H, td, J=6.0, 5.2 Hz), 7.54 (2H, dt, J=8.4, 1.8 Hz), 7.76 (2H, dt, J=8.4, 1.8 Hz), 7.97 (1H, br s).

### Reference Example 22

[chemical structure]

[0695] Step 1 of Reference Example 22

[0696] A crude product of compound RE22-2 was obtained in the same way as in step 1 of Reference Example 2 using compound RE22-1 (manufactured by Tokyo Chemical Industry Co., Ltd., 1.2 μg, 4.24 mmol).

[0697] ESI-MS m/z: 608 (M+Na)⁺

[0698] Step 2 of Reference Example 22

[0699] Compound R22-3 (1.34 g, 2-step yield: 52%) was obtained in the same way as in step 5 of Reference Example 2 using a crude product of compound RE22-2.

[0700] ESI-MS m/z: 386 (M+Na)⁺

[0701] ¹H-NMR (400 MHz, CDCl₃): δ 3.34 (2H, t, J=6.4 Hz), 3.47 (2H, t, J=6.4 Hz), 3.79 (6H, s), 6.78-6.84 (4H, m), 7.17-7.21 (1H, m), 7.27-7.35 (6H, m), 7.42-7.46 (2H, m).

[0702] Step 3 of Reference Example 22

[0703] Compound RE22-4 (560 mg, yield: 31%) was obtained in the same way as in step 3 of Reference Example 3 using compound RE22-3 (1.15 g, 3.16 mmol) and Fmoc-Ser(tBuMe2Si)—OH (manufactured by Watanabe Chemical Industries, Ltd., 1.677 g, 3.8 mmol).

[0704] ¹H-NMR (400 MHz, CDCl3) δ: 0.00-0.07 (6H, m), 0.83-0.89 (9H, m), 3.18-3.26 (2H, m), 3.39-3.46 (2H, m), 3.61-3.68 (1H, m), 3.76 (6H, s), 3.89 (1H, dd, J=10.0, 4.0 Hz), 4.03 (1H, dd, J=10.0, 4.0 Hz), 4.15-4.20 (1H, m), 4.22-4.28 (1H, m), 4.32-4.40 (2H, m), 5.65-5.88 (1H, m), 6.76-6.85 (4H, m), 7.16-7.23 (1H, m), 7.25-7.34 (8H, m), 7.36-7.44 (4H, m), 7.50-7.64 (2H, m), 7.72-7.79 (2H, m).

### Reference Example 23

[0705] Compounds RE23-6 to RE23-10 described in Table Y-2 were obtained in the same way as in Reference Example 22 using compounds RE23-1 to RE23-5 described in Table Y-1 and Fmoc-Ser(tBuMe₂Si)—OH.

[0706] Compound RE23-11 described in Table Y-2 was obtained in the same way as in Reference Example 22 using compound RE22-3 of Reference Example 22 and Fmoc-Thr(tBuMe₂Si)—OH.

[0707] Compound RE23-12 described in Table Y-2 was obtained in the same way as in Reference Example 22 using compound RE23-1 described in Table Y-1 and Fmoc-Thr(tBuMe₂Si)—OH.

[0708] NMR analysis data on the compounds synthesized in this Example are shown in Table Y-3.

TABLE Y-1

| | |
|---|---|
| [chemical structure] | RE23-1 |
| [chemical structure] | RE23-2 |
| [chemical structure] | RE23-3 |
| [chemical structure] | RE23-4 |
| [chemical structure] | RE23-5 |

TABLE Y-2

| | |
|---|---|
| [chemical structure] | RE23-6 |
| [chemical structure] | RE23-7 |
| [chemical structure] | RE23-8 |
| [chemical structure] | RE23-9 |
| [chemical structure] | RE23-10 |
| [chemical structure] | RE23-11 |
| [chemical structure] | RE23-12 |

TABLE Y-3

| Compounds | |
|---|---|
| of Reference | |
| Example 23 | NMR spectrum |
| RE23-6 | ¹H-NMR (400 MHz, CDCl₃): δ 0.07-0.03 (6H, m), 0.89-0.87 (9H, m H), 2.04- |
| | 1.65 (4H, m), 3.86-3.68 (11H, m), 4.37-4.18 (4H, m), 4.69-4.68 (1H, m), |
| | 5.67-5.65 (1H, m), 6.84-6.80 (4H, m), 7.18-7.16 (3H, m), 7.33- |
| | 7.25 (7H, m), 7.42-7.38 (3H, m), 7.60-7.58 (2H, m), 7.78-7.75 (2H, m). |
| RE23-7 | ¹H-NMR (400 MHz, CDCl₃): δ 0.11-0.05 (6H, m), 0.91-0.87 (9H, m), 1.43- |
| | 1.19 (4H, m), 2.00-1.80 (3H, m), 3.74-3.36 (2H, m), 3.81-3.75 (6H, |
| | m), 4.41-3.96 (5H, m), 5.71-5.64 (1H, m), 6.37-6.36 (1H, m), 6.84- |
| | 6.80 (4H, m), 7.20-7.16 (2H, m), 7.42-7.25 (10H, m), 7.59-7.48 (3H, |
| | m), 7.78-7.75 (2H, m). |
| RE23-8 | ¹H-NMR (400 MHz, CDCl₃): δ 0.08-0.03 (6H, m), 0.98-0.81 (9H, m), 1.20- |
| | 1.07 (2H, m), 1.39-1.30 (2H, m), 1.42-1.40 (1H, m), 1.71-1.60 (2H, |
| | m), 3.36-3.14 (1H, m), 3.73-3.60 (3H, m), 3.80-3.77 (6H, m), 4.33- |
| | 4.18 (1H, m), 4.35-4.34 (2H, m), 4.78-4.77 (1H, m), 5.75-5.74 (1H, |
| | m), 6.83-6.81 (4H, m), 7.35-7.26 (5H, m), 7.39-7.37 (6H, m), 7.50- |
| | 7.48 (2H, m), 7.61-7.57 (2H, m), 7.77-7.74 (2H, m) |
| RE23-9 | ¹H-NMR (400 MHz, CDCl₃): δ 0.04-0.00 (6H, m), 0.87-0.80 (9H, m), 1.47- |
| | 1.11 (3H, m), 1.92-1.61 (1H, m), 4.83-2.99 (16H, m), 5.88-5.72 (1H, |
| | m), 6.89-6.82 (4H, m), 7.21-7.14 (1H, m), 7.49-7.28 (12H, m), 7.62- |
| | 7.69 (2H, m), 7.77-7.75 (2H, m) |
| RE23-10 | ¹H-NMR (400 MHz, CDCl₃): δ 0.01-0.05 (6H, m), 0.66-0.92 (9H, m), 1.11- |
| | 1.12 (3H, m), 3.02-3.06 (1H, m), 3.55-3.62 (1H, m), 3.69-3.75 (6H, |
| | m), 3.91-4.35 (6H, m), 5.62 (1H, s), 6.74-6.78 (4H, m), 7.10-7.12 |
| | (2H, m), 7.14-7.27 (7H, m), 7.30-7.36 (4H, m), 7.43-7.53 (2H, m), |
| | 7.68-7.71 (2H, m). |
| RE23-11 | ¹H-NMR (400 MHz, CDCl₃): δ 0.14-0.08 (6H, m), 1.10-0.87 (9H, m), 1.56- |
| | 1.55 (3H, m), 3.48-3.41 (2H, m), 3.81-3.73 (7H, m), 4.25-4.14 (2H, |
| | m), 4.45-4.39 (3H, m), 5.77-5.76 (1H, m), 6.84-6.79 (4H, m), 7.18- |
| | 7.16 (3H, m), 7.42-7.26 (10H, m), 7.61-7.56 (2H, m), 7.78-7.74 (2H, |
| | m). |
| RE23-12 | ¹H-NMR (400 MHz, CDCl₃): δ 0.10-0.00 (6H, m), 1.81-0.72 (9H, m), 1.12- |
| | 1.11 (3H, m), 1.47-1.54 (1H, m), 1.83-1.77 (3H, m), 3.71-3.47 (9H, |
| | m), 4.39-4.00 (6H, m), 5.65-5.53 (1H, m), 6.74-6.71 (4H, m), 7.08- |
| | 7.06 (3H, m), 7.32-7.16 (10H, m), 7.52-7.48 (2H, m), 7.67-7.65 (2H, |
| | m). |

### Reference Example 24

[chemical structure]

[0710] Compound RE24-2 (1.2 g, yield: 67%) was obtained in the same way as in step 2 of Reference Example 2 using compound RE24-1 (compound RE22-4 in Reference Example 22, 2.487 g, 3.16 mmol) synthesized by the method described in Reference Example 22.

[0711] ESI-MS m/z: 587 (M+Na)⁺

[0712] ¹H-NMR (400 MHz, CDCl₃): δ −0.01-0.07 (6H, m), 0.86-0.90 (9H, m), 3.15-3.21 (2H, m), 3.41-3.48 (3H, m), 3.72 (1H, dd, J=10.0, 6.4 Hz), 3.79 (6H, s), 3.84 (1H, dd, J=10.0, 4.8 Hz), 6.79-6.84 (4H, m), 7.18-7.23 (1H, m), 7.27-7.33 (6H, m), 7.40-7.44 (2H, m), 7.72-7.75 (1H, br m).

### Reference Example 25

[0713] Compounds RE25-1 to RE25-7 described in Table Z-1 were obtained in the same way as in Reference Example 24 using compounds RE23-6 to RE23-12 described in Table Y-2.

[0714] The mass spectrometry results of the compounds synthesized in this Example are shown in Table Z-2.

TABLE Z-1

| | |
|---|---|
| [chemical structure] | RE25-1 |
| [chemical structure] | RE25-2 |
| [chemical structure] | RE25-3 |
| [chemical structure] | RE25-4 |
| [chemical structure] | RE25-5 |
| [chemical structure] | RE25-6 |
| [chemical structure] | RE25-7 |

TABLE Z-2

| Compounds of | |
|---|---|
| Reference | |
| Example 25 | ESI-MS m/z |
| RE25-1 | 605 (M + H)+ |
| RE25-2 | 619 (M + H)+ |
| RE25-3 | 303 (M + H)+, DMTr-deprotected product detected |
| RE25-4 | 649 (M + HCOO)− |
| RE25-5 | 577(M − H)− |
| RE25-6 | 623 (M + HCOO)− |
| RE25-7 | 317 (M + H)+, DMTr-deprotected product detected |

### Reference Example 26

[chemical structure]

[chemical structure]

[0716] Step 1 of Reference Example 26

[0717] Compound RE26-1 (2.00 g, 9.47 mmol) was dissolved in N,N′-dimethylformamide (40 mL). To the solution, iminodiacetic acid di-tert-butyl ester (5.11 g, 20.84 mmol), 1-(3-dimethylaminopropyl)-3-ethylcarbodiimide hydrochloride (4.00 g, 20.84 mmol), and 1-hydroxybenzotriazole monohydrate (145 mg, 0.947 mmol) were added at room temperature, and the mixture was stirred for 2 hours. Water was added to the reaction solution, followed by extraction with ethyl acetate. Then, the organic layer was washed with a saturated aqueous solution of sodium bicarbonate and saturated saline and dried over anhydrous sodium sulfate. The solvent was distilled off under reduced pressure, and the residue was purified by silica gel column chromatography (heptane/ethyl acetate=50/50). The purified product was further slurry-purified with methanol to obtain compound RE26-2 (4.07 g, yield: 65%).

[0718] ESI-MS m/z: 664 (M−H)⁻

[0719] Step 2 of Reference Example 26

[0720] Compound RE26-2 (2.66 g, 4.00 mmol) was dissolved in tetrahydrofuran (53 mL). To the solution, a 10% palladium-carbon powder (water-containing product, 54.29%; 490 mg) was added at room temperature, and the mixture was stirred for 3 hours in a hydrogen atmosphere. The reaction solution was filtered, and the solvent was distilled off under reduced pressure to obtain compound RE26-3 (2.86 μg, yield: 113%).

[0721] ESI-MS m/z: 634 (M−H)⁻

[0722] Step 3 of Reference Example 26

[0723] Compound RE26-3 (871.0 mg, 1.370 mmol) was dissolved in N,N′-dimethylformamide (17 mL). To the solution, 0-(7-azabenzotriazol-1-yl)-N,N,N′,N′-tetramethyluronium hexafluorophosphate (625.0 mg, 1.644 mmol), diisopropylethylamine (0.5730 mL, 3.290 mmol), and dodecanedioic acid monobenzyl ester (527.0 mg, 1.644 mmol) were added, and the mixture was stirred overnight at room temperature. Water was added to the reaction solution, followed by extraction with ethyl acetate. Then, the organic layer was washed with a saturated aqueous solution of sodium bicarbonate and saturated saline and dried over anhydrous sodium sulfate. The solvent was distilled off under reduced pressure, and the residue was purified by silica gel column chromatography (heptane/ethyl acetate=60/40) to obtain compound RE26-4 (1.030 μg, yield: 80%).

[0724] ESI-MS m/z: 939 (M+H)⁺

[0725] Step 4 of Reference Example 26

[0726] Compound RE26-4 (1.030 g, 1.098 mmol) was dissolved in dichloromethane (10 mL). To the solution, trifluoroacetic acid (10.00 mL, 130.0 mmol) was added, and the mixture was stirred at room temperature for 1 hour. The solvent was distilled off under reduced pressure to obtain a crude product of compound RE26-5.

[0727] ESI-MS m/z: 713 (M−H)⁻

### Reference Example 27

[chemical structure]

[chemical structure]

[0729] Step 1 of Reference Example 27

[0730] Compound RE27-1 (2.000 g, 12.98 mmol) was dissolved in N,N′-dimethylformamide (30 mL). To the solution, potassium bicarbonate (1.559 g, 15.57 mmol) and benzyl chloride (2.328 mL, 19.47 mmol) were added, and the mixture was stirred at room temperature for 4 hours. Saturated ammonium chloride aqueous solution was added to the reaction solution, followed by extraction with dichloromethane. Then, the organic layer was washed with water and dried over anhydrous sodium sulfate. The solvent was distilled off under reduced pressure, and the residue was purified by silica gel column chromatography (heptane/ethyl acetate=50/50) to obtain compound RE27-2 (2.850 g, yield: 90%).

[0731] ESI-MS m/z: 243 (M−H)⁻

[0732] Step 2 of Reference Example 27

[0733] Compound RE27-2 (2.500 g, 10.24 mmol) was dissolved in N,N′-dimethylformamide (30 mL). To the solution, potassium carbonate (5.660 g, 40.90 mmol) and tert-butyl bromoacetic acid (3.300 mL, 22.52 mmol) were added, and the mixture was stirred at 90° C. for 4 hours. Saturated ammonium chloride aqueous solution was added to the reaction solution, followed by extraction with dichloromethane. Then, the organic layer was washed with saturated saline and dried over anhydrous sodium sulfate. The solvent was distilled off under reduced pressure, and the residue was purified by silica gel column chromatography (heptane/ethyl acetate=75/25) to obtain compound RE27-3 (4.300 g, yield: 89%).

[0734] ESI-MS m/z: 472 (M−H)⁻

[0735] Step 3 of Reference Example 27

[0736] Compound RE27-3 (1.000 g, 2.116 mmol) was dissolved in dichloromethane (10 mL). To the solution, trifluoroacetic acid (10.00 mL, 130.0 mmol) was added, and the mixture was stirred at room temperature for 6 hours. The solvent was distilled off under reduced pressure to obtain a crude product of compound RE27-4.

[0737] ESI-MS m/z: 359 (M−H)⁻

[0738] Step 4 of Reference Example 27

[0739] Compound RE27-4 (350.0 mg, 0.9710 mmol) was dissolved in N,N′-dimethylformamide (7 mL). To the solution, 1-hydroxybenzotriazole monohydrate (327.0 mg, 2.137 mmol), 1-(3-dimethylaminopropyl)-3-ethylcarbodiimide hydrochloride (410.0 mg, 2.137 mmol), and iminodiacetic acid di-tert-butyl ester (524.0 mg, 2.137 mmol) were added, and the mixture was stirred at room temperature for 5 hours. Water was added to the reaction solution, followed by extraction with ethyl acetate. Then, the organic layer was washed with a saturated aqueous solution of sodium bicarbonate and saturated saline and dried over anhydrous sodium sulfate. The solvent was distilled off under reduced pressure, and the residue was purified by silica gel column chromatography (heptane/ethyl acetate=60/40) to obtain compound RE27-5 (617.0 mg, yield: 78%).

[0740] ESI-MS m/z: 814 (M−H)⁻

[0741] Step 5 of Reference Example 27

[0742] Compound RE27-5 (610.0 mg, 0.7490 mmol) was dissolved in dichloromethane (6 mL). To the solution, trifluoroacetic acid (6 mL, 78.00 mmol) was added, and the mixture was stirred at room temperature for 1 hour. The solvent was distilled off under reduced pressure to obtain a crude product of compound RE27-6.

[0743] ESI-MS m/z: 590 (M+H)⁺

### Reference Example 28

[chemical structure]

[0745] Step 1 of Reference Example 28

[0746] Compound RE28-1 (compound RE26-3 in Reference Example 26, 474 mg, 0.744 mmol) synthesized by the method described in Reference Example 26 was dissolved in N,N′-dimethylformamide (10 mL). To the solution, trans-cyclohexane-1,4-dicarboxylic acid monobenzyl ester (0.234 mg, 0.893 mmol) synthesized by the method described in Journal of Medicinal Chemistry, Vol. 54, p. 2433-2446, 2011, diisopropylethylamine (0.312 mL, 1.79 mmol), and 0-(7-azabenzotriazol-1-yl)-N,N,N′,N′-tetramethyluronium hexafluorophosphate (339 mg, 0.893 mmol) were added at room temperature, and the mixture was stirred for 6 hours. Water was added to the reaction solution, followed by extraction with ethyl acetate. Then, the organic layer was washed with a saturated aqueous solution of sodium bicarbonate and saturated saline and dried over anhydrous sodium sulfate. The solvent was distilled off under reduced pressure, and the residue was purified by silica gel column chromatography (heptane/ethyl acetate=50/50) to obtain compound RE28-2 (448 mg, yield: 68%).

[0747] ESI-MS m/z: 879 (M−H)⁻

[0748] Step 2 of Reference Example 28

[0749] Compound RE28-2 (341 mg, 0.387 mmol) was dissolved in dichloromethane (3.4 mL). To the solution, trifluoroacetic acid (3.4 mL) was added at room temperature, and the mixture was stirred overnight. The reaction solution was concentrated under reduced pressure and subjected to azeotropy with ethyl acetate, and the residue was slurry-purified with heptane to obtain compound RE28-3 (254 mg, yield: 100%).

[0750] ESI-MS m/z: 656 (M+H)⁺

### Reference Example 29

[chemical structure]

[0752] Step 1 of Reference Example 29

[0753] Compound RE29-1 (500 mg, 2.75 mmol) was dissolved in N,N′-dimethylformamide (10 mL). To the solution, iminodiacetic acid di-tert-butyl ester (1.48 g, 6.04 mmol), 1-(3-dimethylaminopropyl)-3-ethylcarbodiimide hydrochloride (1.16 g, 6.04 mmol), and 1-hydroxybenzotriazole monohydrate (42.0 mg, 0.275 mmol) were added at room temperature, and the mixture was stirred for 4 hours. Water was added to the reaction solution, followed by extraction with ethyl acetate. Then, the organic layer was washed with saturated saline and dried over anhydrous sodium sulfate. The solvent was distilled off under reduced pressure, and the residue was purified by silica gel column chromatography (heptane/ethyl acetate=50/50) to obtain compound RE29-2 (329 mg, yield: 19%).

[0754] ESI-MS m/z: 635 (M−H)⁻

[0755] Step 2 of Reference Example 29

[0756] Compound RE29-2 (323 mg, 0.507 mmol) was dissolved in N,N′-dimethylformamide (6.5 mL). To the solution, potassium carbonate (84.0 mg, 0.609 mmol) and benzyl bromoacetate (139 mg, 0.609 mmol) were added at room temperature, and the mixture was stirred for 3 hours. Water was added to the reaction solution, followed by extraction with ethyl acetate. Then, the organic layer was washed with saturated saline and dried over anhydrous sodium sulfate. The solvent was distilled off under reduced pressure, and the residue was purified by silica gel column chromatography (heptane/ethyl acetate=50/50) to obtain compound RE29-3 (313 mg, yield: 79%).

[0757] ESI-MS m/z: 783 (M−H)⁻

[0758] Step 3 of Reference Example 29

[0759] Compound RE29-3 (312 mg, 0.398 mmol) was dissolved in dichloromethane (3.1 mL). To the solution, trifluoroacetic acid (3.1 mL) was added at room temperature, and the mixture was stirred overnight. The reaction solution was concentrated under reduced pressure and subjected to azeotropy with ethyl acetate to obtain compound RE29-4 (252 mg, quantitative).

[0760] ESI-MS m/z: 561 (M+H)⁺

### Reference Example 30

[chemical structure]

[chemical structure]

[0762] Step 1 of Reference Example 30

[0763] Compound RE30-1 (2.00 g, 9.47 mmol) was dissolved in N,N′-dimethylformamide (40 mL). To the solution, 2-amino-1,3-propanediol (1.90 g, 20.84 mmol), 1-(3-dimethylaminopropyl)-3-ethylcarbodiimide hydrochloride (4.00 g, 20.84 mmol), and 1-hydroxybenzotriazole monohydrate (145 mg, 0.947 mmol) were added at room temperature, and the mixture was stirred for 2 hours. The solvent was distilled off under reduced pressure, and the residue was purified by silica gel column chromatography (ethyl acetate/methanol=70/30). The purified product was further slurry-purified with ethyl acetate to obtain compound RE30-2 (2.68 g, yield: 79%).

[0764] ESI-MS m/z: 356 (M−H)⁻

[0765] Step 2 of Reference Example 30

[0766] Compound RE30-2 (500 mg, 1.40 mmol) was suspended in acetonitrile (10 mL). To the suspension, acrylic acid tert-butyl ester (3.59 g, 28.0 mmol) and benzyltrimethylammonium hydroxide (40% aqueous solution; 1.76 mL, 702 mmol) were added at room temperature, and the mixture was stirred overnight. The solvent was distilled off under reduced pressure, and water was added to the residue, followed by extraction with ethyl acetate. Then, the organic layer was washed with saturated saline and dried over anhydrous sodium sulfate. The solvent was distilled off under reduced pressure, and the residue was purified by silica gel column chromatography (heptane/ethyl acetate=50/50) to obtain compound RE30-3 (300 mg, yield: 24%).

[0767] ESI-MS m/z: 871 (M+H)⁺

[0768] Step 3 of Reference Example 30

[0769] Compound RE30-3 (340 mg, 0391 mmol) was dissolved in tetrahydrofuran (6.8 mL). To the solution, a 10% palladium-carbon powder (water-containing product, 54.29%; 31.3 mg) was added at room temperature, and the mixture was stirred for 6 hours in a hydrogen atmosphere. The reaction solution was filtered, and the solvent was distilled off under reduced pressure. The residue was purified by silica gel column chromatography (heptane/ethyl acetate=30/70) to obtain compound RE30-4 (235 mg, yield: 72%).

[0770] ESI-MS m/z: 841 (M+H)⁺

[0771] Step 4 of Reference Example 30

[0772] Compound RE30-4 (232 mg, 0.276 mmol) was dissolved in N,N′-dimethylformamide (4.6 mL). To the solution, dodecanoic acid monobenzyl ester (0.133 mg, 0.414 mmol), diisopropylethylamine (0.145 mL, 0.829 mmol), and O-(7-azabenzotriazol-1-yl)-N,N,N′,N′-tetramethyluronium hexafluorophosphate (158 mg, 0.414 mmol) were added at room temperature, and the mixture was stirred overnight. Water was added to the reaction solution, followed by extraction with ethyl acetate. Then, the organic layer was washed with a saturated aqueous solution of sodium bicarbonate and saturated saline and dried over anhydrous sodium sulfate. The solvent was distilled off under reduced pressure, and the residue was purified by silica gel column chromatography (heptane/ethyl acetate=30/70) to obtain compound RE30-5 (274 mg, yield: 87%).

[0773] ESI-MS m/z: 1141 (M−H)⁻

[0774] Step 5 of Reference Example 30

[0775] Compound RE30-5 (273 mg, 0.239 mmol) was dissolved in dichloromethane (2.7 mL). To the solution, trifluoroacetic acid (2.7 mL) was added at room temperature, and the mixture was stirred overnight. The reaction solution was concentrated under reduced pressure and subjected to azeotropy with ethyl acetate to obtain compound RE30-6 (231 mg, quantitative).

[0776] ESI-MS m/z: 919 (M+H)⁺

### Reference Example 31

[chemical structure]

[0778] Step 1 of Reference Example 31

[0779] 4-Nitroisophthalic acid RE31-1 (500 mg, 2.37 mmol) and N-Boc-ethylenediamine (808 mg, 5.21 mmol) were dissolved in N,N′-dimethylformamide (10 mL). To the solution, triethylamine (0.90 mL, 7.11 mmol), 1-hydroxybenzotriazole monohydrate (703 mg, 5.21 mmol) and 1-(3-dimethylaminopropyl)-3-ethylcarbodiimide hydrochloride (1.36 g, 7.11 mmol) were added at room temperature, and the mixture was stirred for 16 hours. The reaction solution was aftertreated, and the crude product was purified by silica gel column chromatography to obtain compound RE31-2 (650 mg, yield: 55%).

[0780] Step 2 of Reference Example 31

[0781] Compound RE31-2 (500 mg, 1.01 mmol) and a zinc powder (330 mg, 5.05 mmol) were suspended in methanol (3.5 mL) and tetrahydrofuran (3.5 mL). To the suspension, an aqueous solution of ammonium chloride (378 mg, 7.07 mmol) was added dropwise at 0° C., and the mixture was stirred at room temperature for 24 hours. The reaction solution was aftertreated, and the crude product was purified by silica gel column chromatography to obtain compound RE31-3 (160 mg, yield: 34%).

[0782] Step 3 of Reference Example 31

[0783] Compound RE31-3 (200 mg, 0.430 mmol) and N-benzyloxycarbonyl-glycine (benzyloxycarbonyl is also referred to as Cbz) (90.0 mg, 0.430 mmol) were dissolved in N,N′-dimethylformamide (2.0 mL). To the solution, diisopropylethylamine (0.220 mL, 1.29 mmol) and O-(7-azabenzotriazol-1-yl)-N,N,N′,N′-tetramethyluronium hexafluorophosphate (245 mg, 0.645 mmol) were added at room temperature, and the mixture was stirred for 16 hours. The reaction solution was aftertreated, and the crude product was purified by silica gel column chromatography to obtain compound RE31-4 (180 mg, yield: 64%).

[0784] ESI-MS m/z: 657 (M+H)⁺

### Reference Example 32

[chemical structure]

[0786] Step 1 of Reference Example 32

[0787] 3,5-Dinitrobenzoic acid RE32-1 (500 mg, 2.36 mmol) and N-Cbz-ethylenediamine (588 mg, 2.83 mmol) were dissolved in N,N′-dimethylformamide (5.0 mL). To the solution, triethylamine (0.65 mL, 4.72 mmol), 1-hydroxybenzotriazole monohydrate (380 mg, 2.83 mmol) and 1-(3-dimethylaminopropyl)-3-ethylcarbodiimide hydrochloride (675 mg, 3.54 mmol) were added at room temperature, and the mixture was stirred for 16 hours. The reaction solution was aftertreated, and the crude product was purified by silica gel column chromatography to obtain compound RE32-2 (445 mg, yield: 48%).

[0788] Step 2 of Reference Example 32

[0789] Compound RE32-2 (200 mg, 0.515 mmol) was dissolved in ethanol (5.0 mL). To the solution, tin(II) chloride (584 mg, 3.09 mmol) and concentrated hydrochloric acid (0.2 mL) were added at room temperature, and the mixture was stirred at 80° C. for 16 hours. The reaction solution was aftertreated to obtain compound RE32-3 (180 mg, quantitative).

[0790] ESI-MS m/z: 329 (M+H)⁺

### Reference Example 33

[chemical structure]

[0792] Step 1 of Reference Example 33

[0793] Compound RE33-2 (3.7 g, yield: 63%) was obtained in the same way as in step 4 of Reference Example 3 using compound RE33-1 (compound RE3-2 in Reference Example 3, 8.17 g, 23.12 mmol) synthesized by the method described in Reference Example 3.

[0794] ESI-MS m/z: 254 (M+H)⁺

[0795] Step 2 of Reference Example 33

[0796] Compound RE33-3 (3.82 g, yield: 67%) was obtained in the same way as in step 5 of Reference Example 3 using compound RE33-2 (3.7 g, 14.63 mmol).

[0797] ESI-MS m/z: 432 (M+HCOO)⁻

[0798] Step 3 of Reference Example 33

[0799] Compound RE33-4 (3.08 g, yield: 87%) was obtained in the same way as in step 2 of Reference Example 1 using compound RE33-3 (3.82 g, 9.86 mmol).

[0800] ESI-MS m/z: 360 (M+H)⁺

### Reference Example 34

[chemical structure]

[0802] Step 1 of Reference Example 34

[0803] Compound RE34-2 (2.40 g, yield: 63%) was obtained in the same way as in step 1 of Reference Example 3 using compound RE34-1 (2 g, 9.53 mmol) and tert-butoxycarbonylamino)-1-pentanol (manufactured by Tokyo Chemical Industry Co., Ltd., 2 g, 10 mmol).

[0804] ESI-MS m/z: 296 (M+H)⁺, detected as a Boc-deprotected form

[0805] Step 2 of Reference Example 34

[0806] Compound RE34-3 (1.579 g, yield: 21%) was obtained in the same way as in steps 2 to 4 of Reference Example 3 and steps 1 to 4 of Reference Example 4 using compound RE34-2.

[0807] ESI-MS m/z: 910 (M+H)⁺

### Reference Example 35: Synthesis of Compound D2

[chemical structure]

[0809] Step 1 of Reference Example 35

[0810] Compound RE35-1 (compound RE11-2 in Reference Example 11, 1.015 g, 1.748 mmol) synthesized by the method described in Reference Example 11 was dissolved in N,N′-dimethylformamide (12 mL). To the solution, a 10% palladium-carbon powder (water-containing product, 54.29%; 187 mg) was added at room temperature, and the mixture was stirred for 6 hours in a hydrogen atmosphere. The reaction solution was filtered. Compound RE26-5 (250.0 mg, 0.350 mmol) synthesized in Reference Example 26, 1-hydroxybenzotriazole monohydrate (26.80 mg, 0.1750 mmol), and 1-(3-dimethylaminopropyl)-3-ethylcarbodiimide hydrochloride (402.0 mg, 2.099 mmol) were added to the filtrate, and the mixture was stirred overnight at room temperature. Water was added to the reaction solution, followed by extraction with ethyl acetate. Then, the organic layer was washed with a saturated aqueous solution of sodium bicarbonate and saturated saline and dried over anhydrous sodium sulfate. The solvent was distilled off under reduced pressure, and the residue was purified by silica gel column chromatography (chloroform/methanol=87/13) to obtain compound RE35-2 (617.0 mg, yield: 88%).

[0811] ESI-MS m/z: 1215 (M+2H)²⁺

[0812] Step 2 of Reference Example 35

[0813] Compound RE35-2 (0.7380 g, 0.3040 mmol) was dissolved in tetrahydrofuran (7 mL). To the solution, a 10% palladium-carbon powder (water-containing product, 54.29%; 135.90 mg) was added at room temperature, and the mixture was stirred overnight in a hydrogen atmosphere. The reaction solution was filtered, and the solvent was distilled off under reduced pressure. The residue was purified by silica gel column chromatography (chloroform/methanol=87/13) to obtain compound D2 (581 mg, yield: 82%).

[0814] ESI-MS m/z: 1170 (M+2H)²⁺

[0815] ¹H-NMR (400 MHz, DMSO-d6, δ): 1.12-2.36 (106H, m), 2.91-3.19 (8H, m), 3.23-3.55 (14H, m), 3.60-3.76 (4H, m), 3.78-3.94 (8H, m), 3.95-4.10 (16H, m), 4.47 (4H, d, J=8.8 Hz), 4.92-5.01 (4H, m), 5.17-5.24 (4H, m), 6.98 (1H, s), 7.64 (2H, s), 7.81-7.95 (4H, m), 8.28-8.38 (2H, m), 8.44-8.56 (2H, m), 10.13 (1H, s)

### Reference Example 36: Synthesis of Compound D3

[chemical structure]

[0817] Step 1 of Reference Example 36

[0818] Compound RE36-1 (compound RE12-2 in Reference Example 12, 500 mg, 0.879 mmol) synthesized by the method described in Reference Example 12 was dissolved in N,N′-dimethylformamide (6.5 mL). To the solution, a 10% palladium-carbon powder (water-containing product, 54.29%; 94 mg) was added at room temperature, and the mixture was stirred for 4 hours in a hydrogen atmosphere. The reaction solution was filtered. Compound RE26-5 (126.0 mg, 0.176 mmol) of Reference Example 26, 1-hydroxybenzotriazole monohydrate (13.47 mg, 0.088 mmol), and 1-(3-dimethylaminopropyl)-3-ethylcarbodiimide hydrochloride (202.0 mg, 1.055 mmol) were added to the filtrate, and the mixture was stirred overnight at room temperature. The solvent in the reaction solution was distilled off under reduced pressure, and the residue was purified by reverse-phase column chromatography (water/acetonitrile) to obtain compound RE36-2 (249.7 mg, yield: 60%).

[0819] ESI-MS m/z: 1191 (M+2H)²⁺

[0820] Step 2 of Reference Example 36

[0821] Compound RE36-2 (0.242 g, 0.102 mmol) was dissolved in tetrahydrofuran (3.6 mL) and water (1.2 mL). To the solution, a 10% palladium-carbon powder (water-containing product, 54.29%; 45 mg) was added at room temperature, and the mixture was stirred for 4 hours in a hydrogen atmosphere. The reaction solution was filtered, and the solvent was distilled off under reduced pressure to obtain compound D3 (216 mg, yield: 93%).

[0822] ESI-MS m/z: 1146 (M+2H) 2+1H-NMR (400 MHz, DMSO-d6, δ): 1.15-1.65 (20H, m), 1.68-2.15 (52H, m), 3.13-3.29 (6H, m), 3.40-3.67 (16H, m), 3.71-3.96 (11H, m), 3.98-4.14 (16H, m), 4.55 (4H, t, J=8.8 Hz), 4.93-5.06 (4H, m), 5.12-5.28 (4H, m), 6.56 (1H, s), 6.98 (1H. s), 7.64 (2H, s), 7.77-7.93 (4H, m), 8.26-8.49 (3H, m), 10.10 (1H, s)

### Reference Example 37: Synthesis of Compound D4

[chemical structure]

[0824] Step 1 of Reference Example 37

[0825] Compound RE37-1 (compound RE13-2 in Reference Example 13, 430 mg, 0.674 mmol) synthesized by the method described in Reference Example 13 was dissolved in N,N′-dimethylformamide (6 mL). To the solution, a 10% palladium-carbon powder (water-containing product, 54.29%; 79 mg) was added at room temperature, and the mixture was stirred for 4 hours in a hydrogen atmosphere. The reaction solution was filtered. Compound RE26-5 (105.0 mg, 0.148 mmol) of Reference Example 26, 1-hydroxybenzotriazole monohydrate (11.31 mg, 0.074 mmol), and 1-(3-dimethylaminopropyl)-3-ethylcarbodiimide hydrochloride (170.0.0 mg, 0.887 mmol) were added to the filtrate, and the mixture was stirred overnight at room temperature. The solvent in the reaction solution was distilled off under reduced pressure, and the residue was purified by reverse-phase column chromatography (water/acetonitrile) to obtain compound RE37-2 (218.1 mg, yield: 56%).

[0826] ESI-MS m/z: 1329 (M+2H)²⁺

[0827] Step 2 of Reference Example 37

[0828] Compound RE37-2 (0.210 g, 0.079 mmol) was dissolved in tetrahydrofuran (3.1 mL) and water (1.0 mL). To the solution, a 10% palladium-carbon powder (water-containing product, 54.29%; 39 mg) was added at room temperature, and the mixture was stirred for 4 hours in a hydrogen atmosphere. The reaction solution was filtered, and the solvent was distilled off under reduced pressure to obtain compound D4 (192.7 mg, yield: 95%).

[0829] ESI-MS m/z: 1284 (M+2H)²⁺

[0830] 1H-NMR (400 MHz, DMSO-d6, δ): 1.17-1.65 (42H, m), 1.69-2.13 (61H, m), 2.95-3.17 (16H, m), 3.65-3.77 (3H, m), 3.79-3.94 (6H, m), 3.96-4.10 (16H, m), 4.48 (4H, d, J=8.4 Hz), 4.96 (4H, dd, J=2.4, 11.2 Hz), 5.21 (4H, d, J=3.2 Hz), 7.01 (1H, s), 7.64-7.92 (11H, m), 8.26-8.48 (4H, m), 10.14 (1H, s)

### Reference Example 38: Synthesis of Compound D5

[chemical structure]

[0832] Step 1 of Reference Example 38

[0833] Compound RE38-1 (compound RE12-2 in Reference Example 12, 450 mg, 0.791 mmol) synthesized by the method described in Reference Example 12 was dissolved in N,N′-dimethylformamide (6 mL). To the solution, a 10% palladium-carbon powder (water-containing product, 54.29%; 85 mg) was added at room temperature, and the mixture was stirred for 5 hours in a hydrogen atmosphere. The reaction solution was filtered. Compound RE27-6 (94 mg, 0.158 mmol) of Reference Example 27, 1-hydroxybenzotriazole monohydrate (133.0 mg, 0.871 mmol), and 1-(3-dimethylaminopropyl)-3-ethylcarbodiimide hydrochloride (182.0 mg, 0.950 mmol) were added to the filtrate, and the mixture was stirred overnight at room temperature. The solvent in the reaction solution was distilled off under reduced pressure, and the residue was purified by reverse-phase column chromatography (water/acetonitrile) to obtain compound RE38-2 (99 mg, yield: 28%).

[0834] ESI-MS m/z: 1129 (M+2H)²⁺

[0835] Step 2 of Reference Example 38

[0836] Compound RE38-2 (80 mg, 0.035 mmol) was dissolved in tetrahydrofuran (1.7 mL) and water (0.85 mL). To the solution, a 10% palladium-carbon powder (water-containing product, 54.29%; 26 mg) was added at room temperature, and the mixture was stirred for 2 hours in a hydrogen atmosphere. The reaction solution was filtered, and the solvent was distilled off under reduced pressure to obtain compound D5 (57.5 mg, yield: 75%).

[0837] ESI-MS m/z: 1084 (M+2H)²⁺

[0838] ¹H-NMR (400 MHz, DMSO-d6, δ): 1.69-2.21 (46H, m), 3.14-3.65 (28H, m), 3.67-4.22 (27H, m), 4.43-4.66 (4H, m), 4.69-4.88 (4H, m), 4.89-5.08 (4H, m), 5.12-5.32 (4H, m), 6.54-6.68 (1H, br), 7.01 (2H, s), 7.78-8.09 (3H, m), 8.13-8.31 (2H, m), 8.58-8.75 (2H, m)

### Reference Example 39: Synthesis of Compound D6

[chemical structure]

[0840] Step 1 of Reference Example 39

[0841] Compound RE39-1 (compound RE13-2 in Reference Example 13, 418 mg, 0.655 mmol) synthesized by the method described in Reference Example 13 was dissolved in N,N′-dimethylformamide (6 mL). To the solution, a 10% palladium-carbon powder (water-containing product, 54.29%; 77 mg) was added at room temperature, and the mixture was stirred for 5 hours in a hydrogen atmosphere. The reaction solution was filtered. Compound RE27-6 (85 ma. 0.144 mmol) synthesized in Reference Example 27, 1-hydroxybenzotriazole monohydrate (121.0 mg, 0.791 mmol), and 1-(3-dimethylaminopropyl)-3-ethylcarbodiimide hydrochloride (165.0 mg, 0.863 mmol) were added to the filtrate, and the mixture was stirred overnight at room temperature. The solvent in the reaction solution was distilled off under reduced pressure, and the residue was purified by reverse-phase column chromatography (water/acetonitrile) to obtain compound RE39-2 (99 mg, yield: 28%).

[0842] ESI-MS m/z: 1268 (M+2H)²⁺

[0843] Step 2 of Reference Example 39

[0844] Compound RE39-2 (186 mg, 0.073 mmol) was dissolved in tetrahydrofuran (2.8 mL) and water (0.93 mL). To the solution, a 10% palladium-carbon powder (water-containing product, 54.29%; 40 mg) was added at room temperature, and the mixture was stirred for 2 hours in a hydrogen atmosphere. The reaction solution was filtered, and the solvent was distilled off under reduced pressure to obtain compound D6 (156.7 mg, yield: 87%).

[0845] ESI-MS m/z: 1222 (M+2H)²⁺

[0846] 1H-NMR (400 MHz, DMSO-d6, δ): 1.36-1.62 (27H, m), 1.67-2.17 (64H, m), 2.92-3.21 (15H, m), 3.58-3.77 (2H, m), 3.80-3.95 (7H, m), 3.97-4.13 (15H, m), 4.47 (4H, d, J=8.8 Hz), 4.88-5.02 (7H, m), 5.10-5.24 (3H, m), 6.95-7.00 (1H, m), 7.26-7.31 (2H, m), 7.72-7.88 (8H, m), 8.10-8.20 (2H, m), 8.51-8.60 (2H, m)

### Reference Example 40

[chemical structure]

[0848] Step 1 of Reference Example 40

[0849] Compound D5 (171 mg, 0.079 mmol) synthesized by the method described in Reference Example 38 was dissolved in N,N′-dimethylformamide (3.4 mL). To the solution, glycine benzyl p-toluenesulfonate (32.0 mg, 0.095 mmol), 1-hydroxybenzotriazole monohydrate (12.09 mg, 0.079 mmol), and 1-(3-dimethylaminopropyl)-3-ethylcarbodiimide hydrochloride (18.16 mg, 0.095 mmol) were added, and the mixture was stirred overnight at room temperature. The solvent in the reaction solution was distilled off under reduced pressure, and the residue was purified by reverse-phase column chromatography (water/acetonitrile) to obtain compound RE40-2 (55.7 mg, yield: 31%).

[0850] ESI-MS m/z: 1158 (M+2H)²⁺

[0851] Step 2 of Reference Example 40

[0852] Compound RE40-2 (54 mg, 0.023 mmol) was dissolved in tetrahydrofuran (0.83 mL) and water (0.28 mL). To the solution, a 10% palladium-carbon powder (water-containing product, 54.29%; 18 mg) was added at room temperature, and the mixture was stirred for 2 hours in a hydrogen atmosphere. The reaction solution was filtered, and the solvent was distilled off under reduced pressure to obtain compound RE40-3 (50.1 mg, yield: 97%).

[0853] ESI-MS m/z: 1112 (M+2H)²⁺

[0854] 1H-NMR (400 MHz, DMSO-d6, δ): 0.96-1.06 (3H, m), 1.71-2.20 (54H, m), 3.41-3.64 (15H, m), 3.68-4.20 (32H), 4.55 (4H, d, J=8.4 Hz), 4.81 (4H, s), 4.94-5.02 (4H, m), 5.17-5.25 (4H, m), 6.63-6.76 (2H, m), 6.93-7.02 (2H, m), 7.84-8.00 (3H, m), 8.17-8.30 (2H, m), 8.58-8.70 (2H, m)

### Reference Example 41: Synthesis of Compound D7

[chemical structure]

[0856] Step 1 of Reference Example 41

[0857] Compound RE41-1 (500 mg, 0.861 mmol) was dissolved in N,N′-dimethylformamide (10 mL). To the solution, a 10% palladium-carbon powder (water-containing product, 54.29%; 92.1 mg) was added at room temperature, and the mixture was stirred for 2 hours in a hydrogen atmosphere. Compound RE27-3 (113 mg, 0.172 mmol) synthesized in Reference Example 27, 1-(3-dimethylaminopropyl)-3-ethylcarbodiimide hydrochloride (198 mg, 1.03 mmol), and 1-hydroxybenzotriazole monohydrate (13.2 mg, 0.086 mmol) were added thereto at room temperature in an argon atmosphere, and the mixture was stirred overnight. The reaction solution was filtered through celite, and the solvent was distilled off under reduced pressure. The residue was purified by silica gel column chromatography (chloroform/methanol=90/10) and further purified by reverse-phase preparative HPLC (acetonitrile/water) to obtain compound RE41-2 (195 mg, yield: 48%).

[0858] ESI-MS m/z: 1186 (M+2H)²⁺

[0859] Step 2 of Reference Example 41

[0860] Compound RE41-2 (194 mg, 0.082 mmol) was dissolved in tetrahydrofuran (2.9 mg) and water (1.0 mL). To the solution, a 10% palladium-carbon powder (water-containing product, 54.29%; 35.7 mg) was added at room temperature, and the mixture was stirred for 8 hours in a hydrogen atmosphere. The reaction solution was filtered, and the solvent was distilled off under reduced pressure to obtain compound D7 (183 mg, yield: 98%).

[0861] ESI-MS m/z: 1141 (M+2H)²⁺

[0862] 1H-NMR (400 MHz, DMSO-d6, δ): 1.21-1.45 (m, 40H), 1.76-2.18 (m, 50H), 3.00-3.09 (m, 8H), 3.40-4.20 (m, 32H), 4.47 (d, J=8.5 Hz, 4H), 4.96 (dd, J=3.1, 11.2 Hz, 4H), 5.21 (d, J=3.1 Hz, 4H), 6.98 (s, 1H), 7.65 (s, 2H), 7.84 (d, J=9.0 Hz, 4H), 8.31 (brs, 1H), 8.44 (brs, 1H), 10.11 (s, 1H).

### Reference Example 42: Synthesis of Compound D8

[chemical structure]

[0864] Step 1 of Reference Example 42

[0865] Compound RE42-1 (compound RE11-2 in Reference Example 11, 500 mg, 0.861 mmol) synthesized by the method described in Reference Example 11 was dissolved in N,N′-dimethylformamide (10 mL). To the solution, a 10% palladium-carbon powder (water-containing product, 54.29%; 92.1 mg) was added at room temperature, and the mixture was stirred for 2 hours in a hydrogen atmosphere. Compound RE29-4 (97.0 mg, 0.172 mmol) synthesized in Reference Example 29, 1-(3-dimethylaminopropyl)-3-ethylcarbodiimide hydrochloride (198 mg, 1.03 mmol), and 1-hydroxybenzotriazole monohydrate (13.2 mg. 0.086 mmol) were added thereto at room temperature in an argon atmosphere, and the mixture was stirred overnight. The reaction solution was filtered through celite, and the solvent was distilled off under reduced pressure. The residue was purified by silica gel column chromatography (chloroform/methanol=85/15) and further purified by reverse-phase preparative HPLC (acetonitrile/water) to obtain compound RE42-2 (179 mg, yield: 46%).

[0866] ESI-MS m/z: 1138 (M+2H)²⁺

[0867] Step 2 of Reference Example 42

[0868] Compound RE42-2 (175 mg, 0.077 mmol) was dissolved in tetrahydrofuran (2.6 mg) and water (0.9 mL). To the solution, a 10% palladium-carbon powder (water-containing product, 54.29%; 32.4 mg) was added at room temperature, and the mixture was stirred for 1 hour in a hydrogen atmosphere. The reaction solution was filtered, and the solvent was distilled off under reduced pressure to obtain compound D8 (160 mg, yield: 95%).

[0869] ESI-MS m/z: 1093 (M+2H)²⁺

[0870] ¹H-NMR (400 MHz, DMSO-d6, δ): 1.23-1.45 (m, 32H), 1.77 (s, 12H), 1.89 (s, 12H), 1.99 (s, 12H), 2.10 (s, 12H), 3.01-3.11 (m, 8H), 3.69-4.02 (m, 34H), 4.47-4.50 (m, 4H), 4.94-4.98 (m, 4H), 5.21 (d, J=3.1 Hz, 4H), 6.92 (s, 1H), 6.94 (s, 2H), 7.87 (d, J=9.4 Hz, 2H), 7.92 (d, J=8.5 Hz, 2H), 8.33 (brs, 2H), 8.50 (brs, 2H).

### Reference Example 43: Synthesis of Compound D9

[chemical structure]

[0872] Step 1 of Reference Example 43

[0873] Compound RE43-1 (compound RE13-2 in Reference Example 13, 500 mg, 0.784 mmol) synthesized by the method described in Reference Example 13 was dissolved in N,N′-dimethylformamide (10 mL). To the solution, a 10% palladium-carbon powder (water-containing product, 54.29%; 92.1 mg) was added at room temperature, and the mixture was stirred for 2 hours in a hydrogen atmosphere. Compound RE30-6 (144 mg, 0.157 mmol) synthesized in Reference Example 30, 1-(3-dimethylaminopropyl)-3-ethylcarbodiimide hydrochloride (180 mg, 0.941 mmol), and 1-hydroxybenzotriazole monohydrate (12.0 mg, 0.078 mmol) were added thereto at room temperature in an argon atmosphere, and the mixture was stirred overnight. The reaction solution was filtered through celite, and the solvent was distilled off under reduced pressure. The residue was purified by silica gel column chromatography (chloroform/methanol=80/20) and further purified by reverse-phase preparative HPLC (acetonitrile/water) to obtain compound RE43-2 (191 mg, yield: 43%).

[0874] ESI-MS m/z: 1431 (M+2H)²⁺

[0875] Step 2 of Reference Example 43

[0876] Compound RE43-2 (186 mg, 0.065 mmol) was dissolved in tetrahydrofuran (2.8 mg) and water (0.9 mL). To the solution, a 10% palladium-carbon powder (water-containing product, 54.29%; 34.3 mg) was added at room temperature, and the mixture was stirred for 1 hour in a hydrogen atmosphere. The reaction solution was filtered, and the solvent was distilled off under reduced pressure to obtain compound D9 (174 mg, yield: 97%).

[0877] ESI-MS m/z: 1386 (M+2H)²⁺

[0878] ¹H-NMR (400 MHz, DMSO-d6, δ):1.25-4.02 (m, 164H), 4.18-4.26 (m, 2H), 4.47 (d, J=8.1 Hz, 4H), 4.96 (dd, J=3.1, 11.2 Hz, 4H), 5.21 (d, J=3.6 Hz, 4H), 7.74-7.91 (m, 13H), 8.18 (s, 2H), 8.36 (d, J=7.2 Hz, 2H), 10.27 (brs, 1H).

### Reference Example 44: Synthesis of Compound A2

[chemical structure]

[0880] Step 1 of Reference Example 44

[0881] Compound RE44-1 (compound RE31-4 in Reference Example 31, 150 mg, 0.228 mmol) synthesized by the method described in Reference Example 31 was dissolved in dichloromethane (1.5 mL). To the solution, trifluoroacetic acid (1.5 mL) was added at room temperature, and the mixture was stirred for 4 hours. The reaction solution was concentrated under reduced pressure and subjected to azeotropy with ethyl acetate. The residue was dissolved in N,N′-dimethylformamide (3 mL). To the solution, compound RE14-3 (574 mg, 0.571 mmol) of Reference Example 14, 1-(3-dimethylaminopropyl)-3-ethylcarbodiimide hydrochloride (109 mg, 0.571 mmol), triethylamine (0.159 mL, 1.14 mmol), and 1-hydroxybenzotriazole monohydrate (3.50 mg, 0.023 mmol) were added at room temperature, and the mixture was stirred overnight. The reaction solution was concentrated under reduced pressure, and the residue was purified by silica gel column chromatography (chloroform/methanol=90/10) and further purified by reverse-phase preparative HPLC (acetonitrile/water) to obtain compound RE44-2 (242 mg, yield: 44%).

[0882] ESI-MS m/z: 1216 (M+2H)²⁺

[0883] Step 2 of Reference Example 44

[0884] Compound RE44-2 (242 mg, 0.100 mmol) was dissolved in tetrahydrofuran/water (4/1; 12 mL). To the solution, a 10% palladium-carbon powder (water-containing product, 54.29%; 44.6 mg) was added at room temperature, and the mixture was stirred for 2 hours in a hydrogen atmosphere. 6-Maleimidohexanoic acid (23.2 mg, 0.110 mmol) and 4-(4,6-dimethoxy-1,3,5-triazin-2-yl)-4-methylmorpholinium chloride (55.2 mg, 0.199 mmol) was added thereto at room temperature in an argon atmosphere, and the mixture was stirred overnight. The reaction solution was filtered through celite, and the solvent was distilled off under reduced pressure. The residue was purified using HP20 resin (acetone/water) to obtain compound A2 (97.4 mg, yield: 39%).

[0885] ESI-MS m/z: 1245 (M+2H)²⁺

[0886] ¹H-NMR (400 MHz, DMSO-d6, δ):1.14-2.16 (100H, m), 2.96-2.98 (4H, m), 3.24-3.41 (18H, m), 3.69-3.73 (4H, m), 3.83-3.91 (6H, m), 4.14-4.16 (2H, m), 4.47 (4H, d, J=8.6 Hz), 4.96 (4H, dd, J=3.6, 11.3 Hz), 5.21 (4H, d, J=3.2 Hz), 7.01 (2H, s), 7.73-7.75 (2H, m), 7.83-7.94 (7H, m), 8.05-8.08 (2H, m), 8.14-8.20 (3H, m), 8.55-8.56 (2H, m), 10.24 (1H, brs).

### Reference Example 45: Synthesis of Compound A3

[chemical structure]

[0888] Step 1 of Reference Example 45

[0889] Compound RE45-1 (compound RE32-3 in Reference Example 32, 75.0 mg, 0.228 mmol) synthesized by the method described in Reference Example 32 was dissolved in N,N′-dimethylformamide (3.0 mL). To the solution, compound RE14-3 (574 mg, 0.571 mmol) of Reference Example 14, diisopropylethylamine (0.199 mL, 1.14 mmol), and 0-(7-azabenzotriazol-1-yl)-N,N,N′,N′-tetramethyluronium hexafluorophosphate (217 mg, 0.571 mmol) were added at room temperature, and the mixture was stirred overnight. The solvent was distilled off under reduced pressure, and the residue was purified by silica gel column chromatography (chloroform/methanol=90/10) and further purified by reverse-phase preparative HPLC (acetonitrile/water) to obtain compound RE45-2 (202 mg, yield: 38%).

[0890] ESI-MS m/z: 1152 (M+2H)²⁺

[0891] Step 2 of Reference Example 45

[0892] Compound RE45-2 (196 mg, 0.085 mmol) was dissolved in tetrahydrofuran/water (4/1; 10 mL). To the solution, a 10% palladium-carbon powder (water-containing product, 54.29%; 36.1 mg) was added at room temperature, and the mixture was stirred for 2 hours in a hydrogen atmosphere. 6-Maleimidohexanoic acid (19.8 mg, 0.094 mmol) and 4-(4,6-dimethoxy-1,3,5-triazin-2-yl)-4-methylmorpholinium chloride (47.0 mg, 0.170 mmol) were added thereto at room temperature in an argon atmosphere, and the mixture was stirred overnight. The reaction solution was filtered through celite, and the solvent was distilled off under reduced pressure. The residue was purified using HP20 resin (acetone/water) to obtain compound A3 (42.4 mg, yield: 21%).

[0893] ESI-MS m/z: 1182 (M+2H)²⁺

### Reference Example 46: Compound D10

[chemical structure]

[0895] Compound D10 (2.2 g, yield: 58%) was obtained in the same way as in steps 1 and 2 of Reference Example 10 using compound RE46-1 (compound RE34-3 in Reference Example 34) synthesized by the method described in Reference Example 34.

[0896] ESI-MS m/z: 2437 (M+H)⁺

### Reference Example 47: Synthesis of Compound A4

[chemical structure]

[chemical structure]

[0898] Step 2 of Reference Example 47

[0899] Compound RE47-3 (0.15 g, yield: 639%) was obtained in the same way as in step 2 of Reference Example 3 using compound RE47-1 (compound RE33-4 in Reference Example 33, 0.101 g, 0.288 mmol) synthesized by the method described in Reference Example 33 and compound RE15-2 (0.607 g, 0.613 mmol) of Reference Example 15.

[0900] ESI-MS m/z: 2304 (M+H)⁺

[0901] Compound RE47-3 (0.15 g, yield: 63%) was obtained in the same way as in step 2 of Reference Example 3 using compound RE47-2 (0.255 g, 0.111 mmol).

[0902] ESI-MS m/z: 2170 (M+H)⁺

[0903] Step 3 of Reference Example 47

[0904] Compound A4 (5.5 mg, yield: 24%) was obtained in the same way as in step 2 of Reference Example 5 using compound RE47-3 (20.8 mg, 9.59 μmol).

[0905] ESI-MS m/z: 1182 (M+2H)²⁺

### Reference Example 48: Synthesis of Compound A5

[chemical structure]

[0907] Step 1 of Reference Example 48

[0908] Compound RE48-2 (0.343 g, yield: 53%) was obtained in the same way as in step 3 of Reference Example 3 using compound RE48-1 (compound RE33-4 in Reference Example 33, 0.099 g, 0.277 mmol) synthesized by the method described in Reference Example 33 and compound RE16-3 (0.618 g, 0.615 mmol) synthesized in step 2 of Reference Example 16.

[0909] ESI-MS m/z: 2333 (M+H)⁺

[0910] Step 2 of Reference Example 48

[0911] Compound A5 (6.9 mg, yield: 28%) was obtained in the same way as in steps 1 and 2 of Reference Example 10 using compound RE48-2.

[0912] ESI-MS m/z: 2392 (M+H)⁺

### Reference Example 49: Synthesis of Compound A6

[chemical structure]

[0914] Compound A6 (0.040 g, yield: 78%) was obtained in the same way as in the synthesis of compound A1 of Reference Example 8 using compound RE49-1 (0.048 g, 0.021 mmol) and N-succinimidyl 3-maleimidopropionate (manufactured by Tokyo Chemical Industry Co., Ltd., 0.017 g, 0.064 mmol).

[0915] ESI-MS m/z: 2480 (M+HCOO)⁻

### Reference Example 50: Synthesis of Compound A7

[chemical structure]

[0917] Step 131

[0918] Compound A7 (9.1 mg, yield: 36%) was obtained in the same way as in step 3 of Reference Example 3 using compound D1 (23.6 mg, 9.46 μmol) synthesized by the method described in Reference Example 10 and N-(2-aminoethyl)maleimide trifluoroacetate (manufactured by Sigma-Aldrich Co. LLC, 7.21 mg, 0.028 μmol).

[0919] ESI-MS m/z: 1310 (M+2H)²⁺

### Reference Example 51

[chemical structure]

[chemical structure]

[0921] Step 1 of Reference Example 51

[0922] Compound RE51-2 (0.076 g, yield: 56%) was obtained in the same way as in step 1 of Reference Example 4 using compound RE51-1 (0.122 g, 0.054 mmol) synthesized by the method described in Reference Example 7 and hexanoic acid monobenzyl ester synthesized in the same way as the method described in Bioconjugate Chemistry, Vol. 22, p. 690-699, 2011.

[0923] ESI-MS m/z: 2503 (M+H)⁺

[0924] Step 2 of Reference Example 51

[0925] Compound RE51-3 (0.030 g, yield: 40%) was obtained in the same way as in step 1 of Reference Example 3 using compound RE51-2 (0.076 g, 0.03 mmol).

[0926] ESI-MS m/z: 2412 (M+H)⁺

### Reference Example 52

[chemical structure]

[0928] Compound RE52-2 (7 mg, yield: 65%) was obtained in the same way as in step 7 of Reference Example 3 using compound RE52-1 (compound RE6-5 in Reference Example 6, 4.36 mg, 0.006 mmol) synthesized by the method described in Reference Example 6 and compound RE1-4 (10 mg, 0.02 mmol) of Reference Example 1.

[0929] ESI-MS m/z: 1581 (M−H)⁻

### Reference Example 53: Synthesis of Compound C2

[chemical structure]

[chemical structure]

[0931] Step 1 of Reference Example 53

[0932] Compound RE53-1 (0.129 g, yield: 55%) was obtained in the same way as in step 3 of Reference Example 10 using compound D10 (0.2011 g, 0.079 mmol) synthesized by the method described in Reference Example 46.

[0933] ESI-MS m/z: 2972 (M+HCOO)⁻

[0934] Step 2 of Reference Example 53

[0935] A crude product of compound RE53-2 was obtained in the same way as in step 4 of Reference Example 10 using compound RE53-1 (0.129 g, 0.044 mmol).

[0936] ESI-MS m/z: 1535 (M+HCOOH-2H)²⁻

[0937] Step 3 of Reference Example 53

[0938] Compound C2 (19.4 μmol/g, yield: 35%) was obtained in the same way as in step 5 of Reference Example 10 using compound RE53-2 (0.0467 g, 0.013 mmol).

### Reference Example 54: Synthesis of Compound C3

[chemical structure]

[chemical structure]

[0940] Step 1 of Reference Example 54

[0941] Compound RE54-1 (90 mg, yield: 76%) was obtained in the same way as in step 3 of Reference Example 10 using compound D1 (100 mg. 0.040 mmol) synthesized by the method described in Reference Example 10 and compound RE17-2 of Reference Example 17.

[0942] ESI-MS m/z: 1335 (M-DMTr+2H)²⁺

[0943] Step 2 of Reference Example 54

[0944] A crude product of compound RE54-2 was obtained in the same way as in step 4 of Reference Example 10 using compound RE54-1 (90 mg, 0.030 mmol).

[0945] ESI-MS m/z: 1558 (M+HCOOH-2H)²⁻

[0946] Step 3 of Reference Example 54

[0947] Compound C3 (21.5 μmol/g, 2-step yield: 32%) was obtained in the same way as in step 5 of Reference Example 10 using a crude product of compound RE54-2.

### Reference Example 55: Synthesis of Compound C4

[chemical structure]

[chemical structure]

[0949] Step 1 of Reference Example 55

[0950] Compound RE55-1 (90 mg, yield: 76%) was obtained in the same way as in step 3 of Reference Example 10 using compound D10 (100 mg, 0.039 mmol) synthesized by the method described in Reference Example 46 and compound RE17-2 synthesized in Reference Example 17.

[0951] ESI-MS m/z: 1356 (M+2H)²⁺, detected as a DMTr-deprotected form

[0952] Step 2 of Reference Example 55

[0953] A crude product of compound RE55-2 was obtained in the same way as in step 4 of Reference Example 10 using compound RE55-1 (90 mg, 0.030 mmol).

[0954] ESI-MS m/z: 1579 (M+HCOOH-2H)²⁻

[0955] Step 3 of Reference Example 55

[0956] Compound C4 (17.0 μmol/g, 2-step yield: 26%) was obtained in the same way as in step 5 of Reference Example 10 using a crude product of compound RE55-2.

### Reference Example 56: Synthesis of Compound C5

[chemical structure]

[chemical structure]

[0958] Step 1 of Reference Example 56

[0959] Compound RE56-1 (50 mg, yield: 42%) was obtained in the same way as in step 3 of Reference Example 10 using compound D10 (100 mg, 0.039 mmol) synthesized by the method described in Reference Example 46 and compound RE18-3 synthesized in step 2 of Reference Example 18.

[0960] ESI-MS m/z: 1363 (M+2H)²⁺, detected as a DMTr-deprotected form

[0961] Step 2 of Reference Example 56

[0962] A crude product of compound RE56-2 was obtained in the same way as in step 4 of Reference Example 10 using compound RE56-1 (50 mg, 0.017 mmol).

[0963] ESI-MS m/z: 1587 (M+HCOOH-2H)²⁻

[0964] Step 3 of Reference Example 56

[0965] Compound C5 (0.5 μmol/g, 2-step yield: 1%) was obtained in the same way as in step 5 of Reference Example 10 using a crude product of compound RE56-2.

### Reference Example 57: Synthesis of Compound C6

[chemical structure]

[chemical structure]

[0967] Step 1 of Reference Example 57

[0968] Compound RE57-1 (40 mg, yield: 30%) was obtained in the same way as in step 3 of Reference Example 10 using compound D10 (100 mg, 0.039 mmol) synthesized by the method described in Reference Example 46 and compound RE19-2 of Reference Example 19.

[0969] ESI-MS m/z: 1532 (M+2H)²⁺, detected as a DMTr-deprotected form

[0970] Step 2 of Reference Example 57

[0971] A crude product of compound RE57-2 was obtained in the same way as in step 4 of Reference Example 10 using compound RE57-1 (40 mg, 0.012 mmol).

[0972] ESI-MS m/z: 1582 (M+2H)²⁺, detected as a DMTr-deprotected form

[0973] Step 3 of Reference Example 57

[0974] Compound C6 (0.2 μmol/g, 2-step yield: 1%) was obtained in the same way as in step 5 of Reference Example 10 using a crude product of compound RE57-2.

### Reference Example 58: Synthesis of Compound C7

[chemical structure]

[0976] Step 1 of Reference Example 58

[0977] Compound RE58-1 (58 mg, yield: 77%) was obtained in the same way as in step 3 of Reference Example 10 using compound D1 (70 mg, 0.028 mmol) synthesized by the method described in Reference Example 10 and compound RE21-3 of Reference Example 21.

[0978] ESI-MS m/z: 1341 (M+2H)²⁺

[0979] Step 2 of Reference Example 58

[0980] Compound RE58-1 (58 mg, 0.022 mmol) was dissolved in methanol (0.15 mL). To the solution, compound RE17-1 (16.9 mg, 0.032 mmol) of Reference Example 17 synthesized by the method described in Journal of Organic Chemistry, Vol. 74, p. 6837-6842, 2009, a 1 mol/L aqueous sodium L-ascorbate solution (0.022 mL, 0.022 mmol), a 20 mmol/L aqueous copper(II) sulfate solution (0.011 mL, 0.22 μmol), and a 10 mmol/L solution of tris(2-benzimidazolylmethyl)amine in DMSO (0.022 mL, 0.22 μmol) were added, and the mixture was stirred at room temperature for 3 hours. The reaction solution was purified by silica gel column chromatography (chloroform/methanol=80/20) to obtain compound RE58-2 (7 mg, yield: 10%).

[0981] ESI-MS m/z: 1450 (M+2H)²⁺, detected as a DMTr-deprotected form

[0982] Step 3 of Reference Example 58

[0983] A crude product of compound RE58-3 was obtained in the same way as in step 4 of Reference Example 10 using compound RE58-2 (10 mg, 3.13 μmol).

[0984] ESI-MS m/z: 1500 (M+2H)²⁺, detected as a DMTr-deprotected form

[0985] Step 4 of Reference Example 58

[0986] Compound C7 (8.4 μmol/g, yield: 27%) was obtained in the same way as in step 5 of Reference Example 10 using a crude product of compound RE58-3.

### Reference Example 59

[chemical structure]

[0988] Step 1 of Reference Example 59

[0989] A crude product of compound RE59-1 was obtained in the same way as in step 3 of Reference Example 3 or by the method described in Bioconjugate Chemistry, Vol. 26, p. 1451-1455, 2015 using compound D10 (74.1 mg, 0.029 mmol) synthesized by the method described in Reference Example 46 and compound RE22-2 (15 mg, 0.027 mmol) of Reference Example 22.

[0990] ESI-MS m/z: 1392 (M+H)⁺, detected as a DMTr-deprotected form

[0991] Step 2 of Reference Example 59

[0992] A crude product of compound RE59-2 was obtained by the method described in International Publication No. WO 2015105083 using compound RE59-1 (0.083 g, 0.027 mmol).

[0993] ESI-MS m/z: 2669 (M+H)⁺, detected as a DMTr-deprotected form

[0994] Step 3 of Reference Example 59

[0995] A crude product of compound RE59-3 was obtained in the same way as in step 4 of Reference Example 10 using compound RE59-2 (0.08 g, 0.027 mmol).

[0996] ESI-MS m/z: 1556 (M+HOOH-2H)²⁻

[0997] ¹H-NMR (400 MHz, MeOD): δ 1.45-1.86 (48H, m), 1.93 (12H, s), 1.94 (12H, s), 2.02 (12H, s), 2.13 (12H, s), 2.16-2.28 (17H, m), 2.48 (4H, s), 3.10-3.16 (6H, m), 3.36-3.56 (19H, m), 3.77 (6H, s), 3.80-3.89 (6H, m), 3.98-4.35 (30H, m), 4.53-4.59 (4H, m), 4.66-4.72 (1H, m), 5.04-5.10 (4H, m), 5.31-5.36 (4H, m), 6.81-6.88 (4H, m), 7.17-7.23 (1H, m), 7.26-7.32 (6H, m), 7.38-7.44 (2H, m), 7.54 (2H, br s), 7.90 (1H, br s).

### Reference Example 60

[0998] Compounds described in Tables P-1 and P-2 were obtained in the same way as in steps 1 and 2 of Reference Example 59 using compound D1, and the structure described in Table Z-1 or compound RE20-4 of Reference Example 20.

[0999] The mass spectrometry results of the compounds synthesized in this Example are shown in Table P-3.

TABLE P-1

| | |
|---|---|
| [chemical structure] | RE60-1 |
| [chemical structure] | RE60-2 |
| [chemical structure] | RE60-3 |
| [chemical structure] | RE60-4 |
| [chemical structure] | RE60-5 |
| [chemical structure] | RE60-6 |

TABLE P-2

| | |
|---|---|
| [chemical structure] | RE60-7 |
| [chemical structure] | RE60-8 |
| [chemical structure] | RE60-9 |

TABLE P-3

| Compounds of Reference | |
|---|---|
| Example 60 | ESI-MS x/z |
| RE60-1 | 1537 [symbol] |
| RE60-2 | 1584 [symbol] |
| RE60-3 | 1577 [symbol] |
| RE60-4 | 1577 [symbol] |
| RE60-5 | 1564 [symbol] |
| RE60-6 | 1578 [symbol] |
| RE60-7 | 1564 [symbol] |
| RE60-8 | 1584 [symbol] |
| RE60-9 | 1570 [symbol] |

[symbol]

indicates data missing or illegible when filed

### Reference Example 61: Synthesis of Compound C8

[chemical structure]

[1001] Compound C8 (10.0 μmol/g) was obtained in the same way as in step 5 of Reference Example 10 using compound RE59-3 described in Reference Example 59.

### Reference Example 62: Synthesis of C9 to C17

[1002] Compounds described in Tables Q-1 and Q-2 were obtained in the same way as in Reference Example 61 using the compounds described in Tables P-1 and P-2.

[1003] The supported amounts of the compounds synthesized in this Example are shown in Table Q-3.

TABLE Q-1

| | |
|---|---|
| [chemical structure] | C9 |
| [chemical structure] | C10 |
| [chemical structure] | C11 |
| [chemical structure] | C12 |
| [chemical structure] | C13 |
| [chemical structure] | C14 |

[chemical structure]

TABLE Q-2

| | |
|---|---|
| [chemical structure] | C15 |
| [chemical structure] | C16 |
| [chemical structure] | C17 |

[chemical structure]

TABLE Q-3

| Compound | Supported amount (μmol/g) |
|---|---|
| C9 | 2.6 |
| C10 | 23.1 |
| C11 | 22.2 |
| C12 | 32.7 |
| C13 | 30.5 |
| C14 | 18.1 |
| C15 | 20.4 |
| C16 | 12.7 |
| C17 | 2.2 |

[1004] Example 1: Synthesis of Compounds 1-1 and 1-2

[chemical structure]

[1005] Step 1

[1006] Reference Example compound A1 and a terminally thiolated oligonucleotide synthesized by the method described in Molecules, Vol. 17, p. 13825-13843, 2012 were added and left standing at room temperature for 4 hours. Sodium carbonate was added to the reaction mixture, and the mixture was left standing overnight at 4° C. Compound 1-1 was obtained by purification by any method of anion-exchange chromatography (GE Healthcare Japan Corp., Mono Q 5/50 GL, 10 m, 5.0 mm×50 mm, solution A: 10 mmol/L Tris buffer solution/30% acetonitrile, solution B: gradient with 10 mmol/L Tris buffer solution/30% acetonitrile/1 mol/L NaBr) and reverse-phase liquid chromatography (Waters Corp., X Bridge C18, 5 μm, 4.6 mm×250 mm, 0.1 mol/L triethylammonium acetate buffer solution, solution B: gradient with acetonitrile). The sense strand sequence is as described in Tables R-1 and R-2.

[1007] Step 2

[1008] Compound 1-1 (3′-APCS-ssRNA) synthesized in step 1 was concentration-adjusted (50 μmol/L) with a mixed buffer solution (100 mmol/L potassium acetate, 30 mmol/L 2-[4-(2-hydroxyethyl)piperazin-1-yl]ethanesulfonic acid, HEPES) —KOH (pH 7.4), 2 mmol/L magnesium acetate). The sense strand mentioned above and an antisense strand (50 mol/L) were mixed in equal amounts and left standing at 80° C. for 10 minutes. The antisense strand sequence is as described in Tables R-3 and R-4. The temperature was gradually decreased, and the resultant was left standing at 37° C. for 1 hour to obtain double-stranded compound 1-2.

### Examples 2 to 10: Synthesis of Compounds 2-1 to 10-1 and Compounds 2-2 to 10-2

[1009] Compounds 2-1 to 10-1 and compounds 2-2 to 10-2 were synthesized in the same way as in Example 1 using oligonucleotides having a nucleotide sequence different from that of Example 1.

### Example 11: Synthesis of Compound 11-1 and Compound 11-2

[chemical structure]

[1011] Step 1

[1012] Reference Example compound D5 and a terminally amino group-modified oligonucleotide synthesized by the method described in Molecules, Vol. 17, p. 13825-13843, 2012 were added and reacted by the method described in Bioconjugate Chemistry, Vol. 22, p. 1723-1728, 2011 or Bioconjugate Chemistry, Vol. 26, p. 1451-1455, 2015. Compound 11-1 was obtained by purification by the method described in Example 1.

[1013] Step 2

[1014] Compound 11-2 was obtained in the same way as in step 2 of Example 1.

### Examples 12 to 43: Synthesis of Compounds 12-1 to

[1015] 43-1 and compounds 12-2 to 43-2 Compounds 12-1 to 43-1 and compounds 12-2 to 43-2 were synthesized in the same way as in Example 11 using oligonucleotides having a nucleotide sequence different from that of Example 11.

[1016] The ligand-linker structures of the compounds synthesized in these Examples are shown below.

[chemical structure]

[1017] The sequences (sense strands) and mass spectrometry results of the nucleic acid conjugates synthesized in these Examples are shown in Tables R-1 and R-2. In Tables R-1 and R-2, N(M) represents 2′-O-methyl-modified RNA; N(F) represents 2′-fluorine-modified RNA; p represents 5′ terminal phosphorylation; \hat{ } represents phosphorothioate; X represents a residue of Reference Example compound A1; and Y represents a residue of Reference Example compound D5. The nucleic acid conjugates are constituted by double-stranded nucleic acids of sense strands consisting of ribonucleotides shown in SEQ ID NOs: 2069 to 2111 and antisense strands consisting of ribonucleotides shown in SEQ ID NOs: 2112 to 2154 (the sense strand represented by SEQ ID NO: n (n=2069 to 2111) and the antisense strand represented by SEQ ID NO: [n+43] are paired).

TABLE R-1

| | | Sense strand | | |
|---|---|---|---|---|
| Compound | SEQ ID NO: | sequence (5′--->3′) | Calcd | Found |
| 1-1 | SEQ ID NO: 2069 | [symbol] | 8970.75 | 8967.77 |
| | | [symbol] | | |
| 2-1 | SEQ ID NO: 2070 | [symbol] | 9111.87 | 9108.45 |
| | | [symbol] | | |
| 3-1 | SEQ ID NO: 2071 | [symbol] | 9199.95 | 9195.61 |
| | | [symbol] | | |
| 4-1 | SEQ ID NO: 2072 | [symbol] | 9088.83 | 9087.45 |
| | | [symbol] | | |
| 5-1 | SEQ ID NO: 2073 | [symbol] | 9174.03 | 9172.3 |
| | | [symbol] | | |
| 6-1 | SEQ ID NO: 2074 | [symbol] | 9063.9 | 9060.12 |
| | | [symbol] | | |
| 7-1 | SEQ ID NO: 2075 | [symbol] | 8884.65 | 8882.08 |
| | | [symbol] | | |
| 8-1 | SEQ ID NO: 2076 | [symbol] | 8931.72 | 8929.41 |
| | | [symbol] | | |
| 9-1 | SEQ ID NO: 2077 | [symbol] | 8892.69 | 8889.39 |
| | | [symbol] | | |
| 10-1 | SEQ ID NO: 2078 | [symbol] | 8956.74 | 8955.26 |
| | | [symbol] | | |
| 11-1 | SEQ ID NO: 2079 | [symbol] | 8579-1 | 8577.55 |
| | | [symbol] | | |
| 12-1 | SEQ ID NO: 2080 | [symbol] | NT | NT |
| | | [symbol] | | |
| 13-1 | SEQ ID NO: 2081 | [symbol] | NT | NT |
| | | [symbol] | | |
| 14-1 | SEQ ID NO: 2082 | [symbol] | NT | NT |
| | | [symbol] | | |
| 15-1 | SEQ ID NO: 2083 | [symbol] | 8782.38 | 8781.1 |
| | | [symbol] | | |
| 16-1 | SEQ ID NO: 2084 | [symbol] | NT | NT |
| | | [symbol] | | |
| 17-1 | SEQ ID NO: 2085 | [symbol] | 8493.00 | 8496.61 |
| | | [symbol] | | |
| 18-1 | SEQ ID NO: 2086 | [symbol] | 8540.07 | 8642.96 |
| | | [symbol] | | |
| 19-1 | SEQ ID NO: 2087 | [symbol] | 8601.04 | 8501.97 |
| | | [symbol] | | |
| 20-1 | SEQ ID NO: 2088 | [symbol] | 8365.09 | 8565.86 |
| | | [symbol] | | |
| 21-1 | SEQ ID NO: 2089 | [symbol] | NT | NT |
| | | [symbol] | | |
| 22-1 | SEQ ID NO: 2090 | [symbol] | NT | NT |
| | | [symbol] | | |
| 23-1 | SEQ ID NO: 2091 | [symbol] | NT | NT |
| | | [symbol] | | |
| 24-1 | SEQ ID NO: 2092 | [symbol] | NT | NT |
| | | [symbol] | | |
| 25-1 | SEQ ID NO: 2093 | [symbol] | 8733.27 | 8733.46 |
| | | [symbol] | | |

[symbol]

indicates data missing or illegible when filed

TABLE R-2

| | | Sense strand | | |
|---|---|---|---|---|
| Compound | SEQ ID NO: | sequence (5′--->3′) | Calcd | Found |
| 26-1 | SEQ ID NO: 2094 | [symbol] | NT | NT |
| | | [symbol] | | |
| 27-1 | SEQ ID NO: 2095 | [symbol] | NT | NT |
| | | [symbol] | | |
| 28-1 | SEQ ID NO: 2096 | [symbol] | NT | NT |
| | | [symbol] | | |
| 29-1 | SEQ ID NO: 2097 | [symbol] | NT | NT |
| | | [symbol] | | |
| 30-1 | SEQ ID NO: 2098 | [symbol] | NT | NT |
| | | [symbol] | | |
| 31-1 | SEQ ID NO: 2099 | [symbol] | NT | NT |
| | | [symbol] | | |
| 32-1 | SEQ ID NO: 2100 | [symbol] | NT | NT |
| | | [symbol] | | |
| 33-1 | SEQ ID NO: 2101 | [symbol] | 8576.16 | 8574.89 |
| | | [symbol] | | |
| 34-1 | SEQ ID NO: 2102 | [symbol] | NT | NT |
| | | [symbol] | | |
| 35-1 | SEQ ID NO: 2103 | [symbol] | 8537.12 | 8537.67 |
| | | [symbol] | | |
| 36-1 | SEQ ID NO: 2104 | [symbol] | NT | NT |
| | | [symbol] | | |
| 37-1 | SEQ ID NO: 2105 | [symbol] | NT | NT |
| | | [symbol] | | |
| 38-1 | SEQ ID NO: 2106 | [symbol] | NT | NT |
| | | [symbol] | | |
| 39-1 | SEQ ID NO: 2107 | [symbol] | NT | NT |
| | | [symbol] | | |
| 40-1 | SEQ ID NO: 2108 | [symbol] | NT | NT |
| | | [symbol] | | |
| 41-1 | SEQ ID NO: 2109 | [symbol] | NT | NT |
| | | [symbol] | | |
| 42-1 | SEQ ID NO: 2110 | [symbol] | NT | NT |
| | | [symbol] | | |
| 43-1 | SEQ ID NO: 2111 | [symbol] | NT | NT |
| | | [symbol] | | |

[symbol]

indicates data missing or illegible when filed

[1018] The sequences of the nucleic acid conjugates synthesized in these Examples are shown in Tables R-3 and R-4. In Tables R-3 and R-4, N(M) represents 2′-O-methyl-modified RNA; N(F) represents 2′-fluorine-modified RNA; p represents 5′ terminal phosphorylation; and represents phosphorothioate.

TABLE R-3

| | | Compound No. of sense | |
|---|---|---|---|
| Compound | SEQ ID NO: | strand sequence | Antisense strand sequence (5′→3′) |
| 1-2 | SEQ ID NO: 2112 | 1-1 | [symbol] |
| | | | [symbol] |
| 2-2 | SEQ ID NO: 2113 | 2-1 | [symbol] |
| | | | [symbol] |
| 3-2 | SEQ ID NO: 2114 | 3-1 | [symbol] |
| | | | [symbol] |
| 4-2 | SEQ ID NO: 2115 | 4-1 | [symbol] |
| | | | [symbol] |
| 5-2 | SEQ ID NO: 2116 | 5-1 | [symbol] |
| | | | [symbol] |
| 6-2 | SEQ ID NO: 2117 | 6-1 | [symbol] |
| | | | [symbol] |
| 7-2 | SEQ ID NO: 2118 | 7-1 | [symbol] |
| | | | [symbol] |
| 8-2 | SEQ ID NO: 2119 | 8-1 | [symbol] |
| | | | [symbol] |
| 9-2 | SEQ ID NO: 2120 | 9-1 | [symbol] |
| | | | [symbol] |
| 10-2 | SEQ ID NO: 2121 | 10-1 | [symbol] |
| | | | [symbol] |
| 11-2 | SEQ ID NO: 2122 | 11-1 | [symbol] |
| | | | [symbol] |
| 12-2 | SEQ ID NO: 2123 | 12-1 | [symbol] |
| | | | [symbol] |
| 13-2 | SEQ ID NO: 2124 | 13-1 | [symbol] |
| | | | [symbol] |
| 14-2 | SEQ ID NO: 2125 | 14-1 | [symbol] |
| | | | [symbol] |
| 15-2 | SEQ ID NO: 2126 | 15-1 | [symbol] |
| | | | [symbol] |
| 16-2 | SEQ ID NO: 2127 | 16-1 | [symbol] |
| | | | [symbol] |
| 17-2 | SEQ ID NO: 2128 | 17-1 | [symbol] |
| | | | [symbol] |
| 18-2 | SEQ ID NO: 2129 | 18-1 | [symbol] |
| | | | [symbol] |
| 19-2 | SEQ ID NO: 2130 | 19-1 | [symbol] |
| | | | [symbol] |
| 20-2 | SEQ ID NO: 2131 | 20-1 | [symbol] |
| | | | [symbol] |
| 21-2 | SEQ ID NO: 2132 | 21-1 | [symbol] |
| | | | [symbol] |
| 22-2 | SEQ ID NO: 2133 | 22-1 | [symbol] |
| | | | [symbol] |
| 23-2 | SEQ ID NO: 2134 | 23-1 | [symbol] |
| | | | [symbol] |
| 24-2 | SEQ ID NO: 2135 | 24-1 | [symbol] |
| | | | [symbol] |
| 25-2 | SEQ ID NO: 2136 | 25-1 | [symbol] |
| | | | [symbol] |

[symbol]

indicates data missing or illegible when filed

TABLE R-4

| | | Compound No. | |
|---|---|---|---|
| | | of sense | Antisense strand |
| Compound | SEQ ID NO: | strand sequence | sequence (5--->3′) |
| 26-2 | SEQ ID NO: 2137 | 26-1 | [symbol] |
| | | | [symbol] |
| 27-2 | SEQ ID NO: 2138 | 27-1 | [symbol] |
| | | | [symbol] |
| 28-2 | SEQ ID NO: 2139 | 28-1 | [symbol] |
| | | | [symbol] |
| 29-2 | SEQ ID NO: 2140 | 29-1 | [symbol] |
| | | | [symbol] |
| 30-2 | SEQ ID NO: 2141 | 30-1 | [symbol] |
| | | | [symbol] |
| 31-2 | SEQ ID NO: 2142 | 31-1 | [symbol] |
| | | | [symbol] |
| 32-2 | SEQ ID NO: 2143 | 32-1 | [symbol] |
| | | | [symbol] |
| 33-2 | SEQ ID NO: 2144 | 33-1 | [symbol] |
| | | | [symbol] |
| 34-2 | SEQ ID NO: 2145 | 34-1 | [symbol] |
| | | | [symbol] |
| 35-2 | SEQ ID NO: 2146 | 35-1 | [symbol] |
| | | | [symbol] |
| 36-2 | SEQ ID NO: 2147 | 36-1 | [symbol] |
| | | | [symbol] |
| 37-2 | SEQ ID NO: 2148 | 37-1 | [symbol] |
| | | | [symbol] |
| 38-2 | SEQ ID NO: 2149 | 38-1 | [symbol] |
| | | | [symbol] |
| 39-2 | SEQ ID NO: 2150 | 39-1 | [symbol] |
| | | | [symbol] |
| 40-2 | SEQ ID NO: 2151 | 40-1 | [symbol] |
| | | | [symbol] |
| 41-2 | SEQ ID NO: 2152 | 41-1 | [symbol] |
| | | | [symbol] |
| 42-2 | SEQ ID NO: 2153 | 42-1 | [symbol] |
| | | | [symbol] |
| 43-2 | SEQ ID NO: 2154 | 43-1 | [symbol] |
| | | | [symbol] |

[symbol]

indicates data missing or illegible when filed

### Reference Test Example 1: Measurement of Knockdown Activity of siRNA Against APCS mRNA in Human Cell

[1019] The double-stranded nucleic acids described in Tables 1-1 to 1-13 were synthesized by Sigma-Aldrich Co. LLC and used. Specifically, the double-stranded nucleic acids were prepared by annealing sense strands consisting of ribonucleotides shown in SEQ ID NOs: 2 to 644 and antisense strands consisting of ribonucleotides shown in SEQ ID NOs: 645 to 1287 (the sense strand represented by SEQ ID NO: n (n=2 to 644) and the antisense strand represented by SEQ ID NO: [n+643] are paired). A siRNA/RNAiMax mixed solution of each double-stranded nucleic acid and RNAiMax transfection reagent (manufactured by Thermo Fisher Scientific Inc., Catalog No. 13778150) diluted with Opti-MEM I Reduced Serum Medium (manufactured by Thermo Fisher Scientific Inc., Catalog No. 31985070) was added at 20 μL/well to 384-well culture plates. Human ovary cancer-derived cell line RMG-I cells (JCRB Cell Bank, JCRB0172) were inoculated at 10,000 cells/40 μL/well to the 384-well culture plates and cultured at 37° C. for 24 hours under 5% CO₂ conditions. The medium used was Ham's F-12 Nutrient Mix medium (manufactured by Thermo Fisher Scientific Inc., Catalog No. 11765-047) containing 10% fetal bovine serum (manufactured by Thermo Fisher Scientific Inc., Catalog No. 10091-148). The final concentration of the double-stranded nucleic acid was set to 1 nM. Then, the cells were washed with DPBS, no calcium, no magnesium (manufactured by Thermo Fisher Scientific Inc., Catalog No. 14190-144), and cDNA was synthesized from each of the plates by the following method using TaqMan® Fast Cells-to-CT™ kit (manufactured by Thermo Fisher Scientific Inc., Catalog No. 4399003). A solution of Lysis solution (included in the kit) and DNase I (included in the kit) mixed at a ratio of 100:1 was added at 10 μL/well and mixed for 5 minutes. Stop Solution (included in the kit) was added at 1 μL/well and mixed for 2 minutes to prepare RNA extracts. 5 μL of 2×RT Buffer (included in the kit), 0.5 μL of 20×RT Enzyme Mix (included in the kit), 2.5 μL of Nuclease-free Water, and 2 μL of the RNA extracts were mixed, and this mixture was reacted at 37° C. for 60 minutes and at 95° C. for 5 minutes to synthesize cDNA. This cDNA was added at 2 μL/well to MicroAmp® EnduraPlate™ Optical 384-Well Clear Reaction Plates with Barcode (manufactured by Thermo Fisher Scientific Inc., Catalog No. 4483285), and further, 5 μL of TaqMan® Fast Universal PCR Master Mix (manufactured by Thermo Fisher Scientific Inc., Catalog No. 4352042), 2.5 μL of DISTILLED WATER (ULTRAPURE) (manufactured by Thermo Fisher Scientific Inc., Catalog No. 10977015), 0.25 μL of human APCS probe, and 0.25 μL of human ACTB probe were added to each well. The real-time PCR of the human APCS gene and the human ACTB (actin beta) gene was performed using QuantStudio™ 7 Flex. ACTB, a constitutively expressed gene, was measured as an internal control and used to correct the APCS gene expression level. The amount of APCS mRNA in RMG-I cells treated with only the transfection reagent without the addition of siRNA was defined as 1.0. The relative expression level of APCS mRNA was calculated when each siRNA was transferred. This experiment was conducted twice. The minimum values of the relative expression level of APCS mRNA are shown in Tables 1-1 to 1-13.

TABLE 1-1

| Double- | | | | | | | Relative |
|---|---|---|---|---|---|---|---|
| stranded | | | | | | | APCS |
| nucleic | | Sense strand sequence | | Antisense strand sequence | | | expression |
| acid No. | SEQ ID NO: | (5′→3′) | SEQ ID NO: | (5′→3′) | SEQ ID NO: | Target APCS mRNA sequence | level |
| AH0001 | SEQ ID NO: 2 | GCAUGAAUAUCAGACGCUAGG | SEQ ID NO: 645 | UAGCGUCUGAUAUUCAUGCGC | SEQ ID NO: 1288 | GCAUGAAUAUCAGACGCUA | 0.395 |
| AH0002 | SEQ ID NO: 3 | CAUGAAUAUCAGACGCUAGGG | SEQ ID NO: 646 | CUAGCGUCUGAUAUUCAUGCC | SEQ ID NO: 1289 | CAUGAAUAUCAGACGCUAG | 0.391 |
| AH0003 | SEQ ID NO: 4 | AUAUCAGACGCUAGGGGGACA | SEQ ID NO: 647 | UCCCCCUAGCGUCUGAUAUUC | SEQ ID NO: 1290 | AUAUCAGACGCUAGGGGGA | 0.427 |
| AH0004 | SEQ ID NO: 5 | CUAGGGGGACAGCCACUGUGU | SEQ ID NO: 648 | ACAGUGGCUGUCCCCCUAGCG | SEQ ID NO: 1291 | CUAGGGGGACAGCCACUGU | 0.405 |
| AH0005 | SEQ ID NO: 6 | AGGGGGACAGCCACUGUGUUG | SEQ ID NO: 649 | ACACAGUGCCUGUCCCCUUAG | SEQ ID NO: 1292 | AGGGGGACAGCCACUGUGU | 0.401 |
| AH0006 | SEQ ID NO: 7 | GGGGACAGCCACUGUGUUGUC | SEQ ID NO: 650 | GAACAGAGUGGCUGUCCGGUU | SEQ ID NO: 1293 | GGGGACAGCCACUGUGUUG | 0.458 |
| AH0007 | SEQ ID NO: 8 | GGGACAGCCACUGUGUUGUGU | SEQ ID NO: 651 | ACAACACAGUGGCUGUCCCCC | SEQ ID NO: 1294 | GGGACAGCCACUGUGUUGU | 0.435 |
| AH0008 | SEQ ID NO: 9 | GGACAGCCACGGUGUUGUCUG | SEQ ID NO: 652 | GACAACACAGUGGCUGUCCCC | SEQ ID NO: 1295 | GGACAGCCACUGUGUUGUC | 0.436 |
| AH0009 | SEQ ID NO: 10 | GACAGCCACUGUGUUGUCUCC | SEQ ID NO: 653 | AGACAACAGAGUGGCUGUCCC | SEQ ID NO: 1296 | GACAGCCACUGUGUUGUCU | 0.487 |
| AH0010 | SEQ ID NO: 11 | GCCACUGUGUUGUCUGGUACC | SEQ ID NO: 654 | UAGCAGACAACACAGUGGCUG | SEQ ID NO: 1297 | GCCACUGUGUUGUCUGCUA | 0.288 |
| AH0011 | SEQ ID NO: 12 | CCACUGUGUUGUCUGCUACCC | SEQ ID NO: 655 | GUAGCAGACAACACAGUGGCU | SEQ ID NO: 1298 | CCAGUGUGUUGUCUGCUAC | 0.382 |
| AH0012 | SEQ ID NO: 13 | CACUGUGUUGUCUGCUACCCU | SEQ ID NO: 656 | GGUAGGAGACAACACACUGGC | SEQ ID NO: 1299 | CACUGUGUUGUCUGCUACC | 0.490 |
| AH0013 | SEQ ID NO: 14 | CUGUGUUGUCUGGUACCCUCA | SEQ ID NO: 657 | AGGGUACCAGACAACACAGUG | SEQ ID NO: 1300 | CUGUGUUGUCUGCUACCCU | 0.315 |
| AH0014 | SEQ ID NO: 15 | UGUGUUGUCUGCUACCCUCAU | SEQ ID NO: 658 | GAGGGUAGCAGACAACACAGU | SEQ ID NO: 1301 | UGUGUUGUCUGCUACCCUC | 0.380 |
| AH0015 | SEQ ID NO: 16 | GUGUUGUGUGCUACCCUGAUC | SEQ ID NO: 659 | UGAGGGUAGCAGACAACACAG | SEQ ID NO: 1302 | GUGUUGUCUGCUACCCUCA | 0.273 |
| AH0016 | SEQ ID NO: 17 | UGUUCUGUGGUACCCUGAUCC | SEQ ID NO: 660 | AUGAGGGUAGCAGACAACACA | SEQ ID NO: 1303 | UGUUGUCCCCUACCCUCAU | 0.269 |
| AH0017 | SEQ ID NO: 18 | GUUGUCUGCUACCCUCAUCCU | SEQ ID NO: 661 | GAUGAGGGUACCAGACAACAC | SEQ ID NO: 1304 | GUUGUCUGCUACCCUCAUC | 0.345 |
| AH0018 | SEQ ID NO: 19 | GUCUGCUACCCUCAUCCUGGU | SEQ ID NO: 662 | UAGGAUGAGGGUAGCAGACAA | SEQ ID NO: 1305 | GUCUGGUACCCUCAUCCUG | 0.406 |
| AH0019 | SEQ ID NO: 20 | CUGGUACCCUCAUCCUGGUCA | SEQ ID NO: 663 | ACCAGGAUGAGGGUAGCAGAC | SEQ ID NO: 1306 | CUGCUACCCUCAUCCUGGU | 0.228 |
| AH0020 | SEQ ID NO: 21 | GCUACCCUGAUGGUGGUCACU | SEQ ID NO: 664 | UGAGCAGGAUGAGGGUACCAG | SEQ ID NO: 1307 | CCUAGCCUCAUCCUGGUCA | 0.278 |
| AH0021 | SEQ ID NO: 22 | CUACCCUCAUCCUGGUCACUG | SEQ ID NO: 665 | GUGACCAGGAUGAGGGUAGCA | SEQ ID NO: 1308 | CUACCCUCAUCCUGGUCAC | 0.234 |
| AH0022 | SEQ ID NO: 23 | UACCCUCAUCCUGGUGAGUGC | SEQ ID NO: 666 | AGUGACCAGGAUGAGGGUAGC | SEQ ID NO: 1309 | UACCCUCAUCCUGGUGACU | 0.234 |
| AH0023 | SEQ ID NO: 24 | ACCCUGAUCCUGGUCAGUGGU | SEQ ID NO: 667 | CAGUCACCAGGAUGAGGGUAG | SEQ ID NO: 1310 | ACCCUCAUCCUGGUCACUG | 0.413 |
| AH0024 | SEQ ID NO: 25 | CCCUCAUCCUGGUCACUGGUU | SEQ ID NO: 668 | GCAGUGACCAGGAUGAGGGUA | SEQ ID NO: 1311 | CCCUCAUCCUGGUCACUGC | 0.288 |
| AH0025 | SEQ ID NO: 26 | CCUCAUCCUGGUCACUGGUUC | SEQ ID NO: 669 | AGCAGUGACCAGGAUGAGGGU | SEQ ID NO: 1312 | CCUGAUCCCGGUCACUGCU | 0.232 |
| AH0026 | SEQ ID NO: 27 | CUCAUCCUGGUCACUGCUUCU | SEQ ID NO: 670 | AAGCAGUGACCAGGAUGAGGG | SEQ ID NO: 1313 | CUCAUCCUGGUCACUGCUU | 0.290 |
| AH0027 | SEQ ID NO: 28 | CAUCCUGGUCACUGCUUCUGC | SEQ ID NO: 671 | AGAAGCAGUGACCAGGAUGAG | SEQ ID NO: 1314 | CAUCCUGGUCAGUGCUUCU | 0.158 |
| AH0028 | SEQ ID NO: 29 | AUCCUGGUCACUGCUUGUGCU | SEQ ID NO: 672 | CAGAAGCAGUGACCAGGAUGA | SEQ ID NO: 1315 | AUCCUGGUCACAGCUUCUG | 0.286 |
| AH0029 | SEQ ID NO: 30 | UCCUGGUCACUGCUUCUGCUA | SEQ ID NO: 673 | GCAGAAGCAGUGACCAGGAUG | SEQ ID NO: 1316 | UCCUGGUCACUGCUUCUGG | 0.304 |
| AH0030 | SEQ ID NO: 31 | CCUGGUCACUGCUUCUCCUAU | SEQ ID NO: 674 | AGCAGAACCAGUGACCAGGAU | SEQ ID NO: 1317 | CCUGGUCACUCCUUCUGCU | 0.083 |
| AH0031 | SEQ ID NO: 32 | CUGGUCACUGCUUCGGCUAUA | SEQ ID NO: 675 | UAGCAGAAGCAGUGACCAGGA | SEQ ID NO: 1318 | CUGGUCACUGCUUCUGCUA | 0.132 |
| AH0032 | SEQ ID NO: 33 | UGGUCACUGCUUCUGCUAUAA | SEQ ID NO: 676 | AUAGCAGAAGCAGUGACCAGG | SEQ ID NO: 1319 | UGGUCACUGCUUCUGCUAU | 0.172 |
| AH0033 | SEQ ID NO: 34 | GGUCACUGCUUCUGCUAUAAC | SEQ ID NO: 677 | UAUAGCAGAAGCAGUGACCAG | SEQ ID NO: 1320 | GGUCACUGCUUCUGCUAUA | 0.117 |
| AH0034 | SEQ ID NO: 35 | GUCACUGCUUCUGCUAUAACA | SEQ ID NO: 678 | UUAUAGCAGAAGGAGUGACCA | SEQ ID NO: 1321 | GUCACUGCUUCUGCUAUAA | 0.174 |
| AH0035 | SEQ ID NO: 36 | CACUGCUUCUGCUAUAACAGC | SEQ ID NO: 679 | UGUUAUAGCAGAAGCAGUGAC | SEQ ID NO: 1322 | CACUGCUUCUGGUAUAAGA | 0.082 |
| AH0036 | SEQ ID NO: 37 | ACUGCUUCUGCUAUAACAGCC | SEQ ID NO: 680 | CUGUUAUAGCAGAAGCAGUGA | SEQ ID NO: 1323 | ACUGCUUCUGCUAUAACAG | 0.215 |
| AH0037 | SEQ ID NO: 38 | CUGCUUCUCCUAUAACACCCC | SEQ ID NO: 681 | GCUGUUAUAGCAGAAGCAGUG | SEQ ID NO: 1324 | CUGCUUCUGCUAUAACAGC | 0.082 |
| AH0038 | SEQ ID NO: 39 | GCUUCUGCUAUAACAGCCCUA | SEQ ID NO: 682 | GGGCUGUUAUAGCAGAAGCAG | SEQ ID NO: 1325 | GCUUCUGCUAUAACAGCCC | 0.208 |
| AH0039 | SEQ ID NO: 40 | CUUCUGCUAUAACAGCCCUAG | SEQ ID NO: 683 | AGGGCUGUUAUAGCAGAAGCA | SEQ ID NO: 1326 | CUUCUGCUAUAACAGCCCU | 0.185 |
| AH0040 | SEQ ID NO: 41 | UUCUGCUAUAACAGCCCUAGG | SEQ ID NO: 684 | UAGGGCUGUUAUAGCAGAAGC | SEQ ID NO: 1327 | UUCUGCUAUAACAGCCCUA | 0.145 |
| AH0041 | SEQ ID NO: 42 | UCUGCUAUAACAGCCCUAGGC | SEQ ID NO: 685 | CUAGCGCUGUUAUAGCAGAAG | SEQ ID NO: 1328 | UCUGCUAUAACAGCCCUAG | 0.371 |
| AH0042 | SEQ ID NO: 43 | CUGCUAUAAGAGCCCUAGGCC | SEQ ID NO: 686 | CCUAGGGCUGUUAUAGCAGAA | SEQ ID NO: 1329 | CUGCUAUAACAGCCCUAGG | 0.203 |
| AH0043 | SEQ ID NO: 44 | UGCUAUAACAGCCCUAGGCCA | SEQ ID NO: 687 | GCCUAGGGCUGUUAUAGCAGA | SEQ ID NO: 1330 | UGCUAUAACAGCCCUAGGC | 0.418 |
| AH0044 | SEQ ID NO: 45 | GCUAUAACAGCCCGAGGCCAG | SEQ ID NO: 688 | GGCCUAGGGCUGUUAUAGCAG | SEQ ID NO: 1331 | GCUAUAACAGCCCUAGGCC | 0.457 |
| AH0045 | SEQ ID NO: 46 | CUAUAACAGCCCUAGGCCAGG | SEQ ID NO: 689 | UGGCCUAGGGCUGUUAUAGCA | SEQ ID NO: 1332 | CUAUAACAGCCCUAGGCCA | 0.115 |
| AH0046 | SEQ ID NO: 47 | UAUAACACCCCUAGGCCAGGA | SEQ ID NO: 690 | CUGCCCUAGGCCUGUUAUAGC | SEQ ID NO: 1333 | UAUAACAGCCCUAGCCCAG | 0.300 |
| AH0047 | SEQ ID NO: 48 | AUAACAGCCCUAGGCCAGGAA | SEQ ID NO: 691 | CCUGGCCUAGGGCUGUUAUAG | SEQ ID NO: 1334 | AUAACAGCCCUAGGCCAGG | 0.396 |
| AH0048 | SEQ ID NO: 49 | UAACAGCCCUAGGCGAGGAAU | SEQ ID NO: 692 | UCCUGGCCUAGGGCUGUUAUA | SEQ ID NO: 1335 | UAACAGCCCUAGGCCAGCA | 0.478 |
| AH0049 | SEQ ID NO: 50 | ACAGCCCUAGCCCAGGAAUAU | SEQ ID NO: 693 | AUUCCUGGCCUAGGGCUGUUA | SEQ ID NO: 1336 | ACAGCCCUAGGCCAGGAAU | 0.283 |
| AH0050 | SEQ ID NO: 51 | CAGCCCUAGGCCAGGAAUAUG | SEQ ID NO: 694 | UAUUCCUGGCCUAGGGCUGUU | SEQ ID NO: 1337 | CAGCCCUAGGCCAGGAAUA | 0.283 |

TABLE 1-2

| Double-stranded | | Sense strand sequence | | Antisense strand | | Target APCS mRNA | Relative APCS |
|---|---|---|---|---|---|---|---|
| nucleic acid No. | SEQ ID NO: | (5′→3′) | SEQ ID NO: | sequence (5′→3′) | SEQ ID NO: | sequence | expression level |
| AH0051 | SEQ ID NO: 52 | AGCCCUAGGCCAGGAAUAUGA | SEQ ID NO: 695 | AUAUUCCUGGCCUAGGGCUGU | SEQ ID NO: 1338 | AGCCCUAGGCCAGGAAUAU | 0.220 |
| AH0052 | SEQ ID NO: 53 | GCCCUAGGCCAGGAAUAUGAA | SEQ ID NO: 696 | CAUAUUCCCGGCCUAGGGCUG | SEQ ID NO: 1339 | GCCCUAGGCCAGGAAUAUG | 0.139 |
| AH0053 | SEQ ID NO: 54 | CCCUAGGCCAGGAAUAUGAAC | SEQ ID NO: 697 | UCAUAUUGGUGGCCUAGGGCU | SEQ ID NO: 1340 | CCCUAGGCCAGGAAUAUGA | 0.158 |
| AH0054 | SEQ ID NO: 55 | CCUAGGCCAGGAAUAUGAACA | SEQ ID NO: 698 | UUCAUAUUCCUGGCCUAGGGC | SEQ ID NO: 1341 | CCUAGGCCAGGAAUAUGAA | 0.185 |
| AH0055 | SEQ ID NO: 56 | CUAGGCCAGGAAUAUGAACAA | SEQ ID NO: 699 | GUUCAUAUUGGUGGCCUAGGG | SEQ ID NO: 1342 | CUAGGCCAGGAAUAUGAAC | 0.433 |
| AH0056 | SEQ ID NO: 57 | UAGGCCAGGAAUAUGAACAAG | SEQ ID NO: 700 | UGUUCAUAUUCCUGGCGUAGG | SEQ ID NO: 1343 | UAGGCCAGGAAUAUGAACA | 0.242 |
| AH0057 | SEQ ID NO: 58 | AGGCCAGGAAUAUGAACAAGC | SEQ ID NO: 701 | UUGUUCAUAUUCCUGGCCUAG | SEQ ID NO: 1344 | AGGCCAGGAAUAUGAACAA | 0.107 |
| AH0058 | SEQ ID NO: 59 | GGCCAGGAAUAUGAACAAGCC | SEQ ID NO: 702 | CUUGUUCAUAUUCCUGGGGUA | SEQ ID NO: 1345 | GGCCAGGAAUAUGAACAAG | [symbol] |
| AH0059 | SEQ ID NO: 60 | CCCAGGAAUAUGAAGAAGCCG | SEQ ID NO: 703 | GCUUGUUCAUAUUCCUGGGGU | SEQ ID NO: 1346 | GCCAGGAAUAUGAACAAGC | 0.221 |
| AH0060 | SEQ ID NO: 61 | CCAGGAAUAUGAACAAGCCGC | SEQ ID NO: 704 | GGCUUGUUCAUAUUCCUGGCC | SEQ ID NO: 1347 | CCAGGAAUAUGAACAAGCC | 0.242 |
| AH0061 | SEQ ID NO: 62 | CAGGAAUAUGAACAAGCCGCU | SEQ ID NO: 705 | CGGCUUGUUCAUAUUCCUGGC | SEQ ID NO: 1348 | CAGGAAUAUGAACAAGCCG | 0.299 |
| AH0062 | SEQ ID NO: 63 | AGGAAUAUGAACAAGGGGCUG | SEQ ID NO: 706 | GGGGCUUGUUCAUAUUCCUGG | SEQ ID NO: 1349 | AGGAAUAUGAACAAGCCGG | [symbol] |
| AH0063 | SEQ ID NO: 64 | GGAAUAUGAACAAGCCGCUGC | SEQ ID NO: 707 | AGCGGCUUGUUCAUAUUCCUG | SEQ ID NO: 1350 | GGAAUAUGAACAAGCCGCU | [symbol] |
| AH0064 | SEQ ID NO: 65 | GAAUAUGAACAAGCGGCUGCU | SEQ ID NO: 708 | CAGCCCCUUGUUCAUAUUCCU | SEQ ID NO: 1351 | CAAUAUGAACAAGCCCCUG | 0.103 |
| AH0065 | SEQ ID NO: 66 | AAUAUGAACAAGCCGCUGCUU | SEQ ID NO: 709 | GCAGCGGCUUGUUCAUAUUCC | SEQ ID NO: 1352 | AAUAUGAACAAGCCGCUGC | 0.444 |
| AH0066 | SEQ ID NO: 67 | AUAUGAACAAGGCGCUGCUUU | SEQ ID NO: 710 | AGGAGGGGCUUGUUGAUAUUC | SEQ ID NO: 1353 | AUAUGAACAACCCGGUGCU | [symbol] |
| AH0067 | SEQ ID NO: 68 | UAUGAACAAGCCGCUGGUUUG | SEQ ID NO: 711 | AAGCAGCGGCUUGUUCAUAUU | SEQ ID NO: 1354 | UAUGAACAAGCCGCUGCUU | [symbol] |
| AH0068 | SEQ ID NO: 69 | AUGAACAAGCCGCUGCUUUGG | SEQ ID NO: 712 | AAAGCAGCGGCUUGUUCAUAU | SEQ ID NO: 1355 | AUGAACAAGCCGCUGGUUU | [symbol] |
| AH0069 | SEQ ID NO: 70 | UGAACAAGCCGCUGCUUUGGA | SEQ ID NO: 713 | CAAAGCAGCGGCUUGUUCAUA | SEQ ID NO: 1356 | UGAACAAGCCGCUGCUUUG | [symbol] |
| AH0070 | SEQ ID NO: 71 | GAACAAGCCGCUGCUUUGGAU | SEQ ID NO: 714 | CCAAAGGAGCGGCUUGUUCAU | SEQ ID NO: 1357 | GAACAAGGGGCUGCUUUGG | 0.149 |
| AH0071 | SEQ ID NO: 72 | AAGAAGGCGCUGCUUUGGAUC | SEQ ID NO: 715 | UGGAAAGGAGGGGCUUGUUGA | SEQ ID NO: 1358 | AACAAGCCGCUGCUUUGGA | 0.130 |
| AH0072 | SEQ ID NO: 73 | ACAAGCCGCUGCUUUGGAUCU | SEQ ID NO: 716 | AUCCAAAGCAGCGGCUUGUUC | SEQ ID NO: 1359 | ACAAGCCGCUGCUUUGGAU | [symbol] |
| AH0073 | SEQ ID NO: 74 | CAAGCCGGUGCUUUGGAUCUC | SEQ ID NO: 717 | GAUCCAAAGCAGCCCCUUGUU | SEQ ID NO: 1360 | CAAGCCCCUGGUUUGGAUG | 0.100 |
| AH0074 | SEQ ID NO: 75 | AAGCCGCUGCUUUGGAUCUCU | SEQ ID NO: 718 | AGAUCCAAAGCAGCGGCUUGU | SEQ ID NO: 1361 | AAGCCGCUGCUUUGGAUCU | [symbol] |
| AH0075 | SEQ ID NO: 76 | AGCCGCUGCUUUGGAUCUCUG | SEQ ID NO: 719 | GAGAUCCAAAGGAGCGGCUUC | SEQ ID NO: 1362 | AGCCGCCGGUUUGGAUCUC | 0.123 |
| AH0076 | SEQ ID NO: 77 | GCGGCUGGUUUGGAUCUCUGU | SEQ ID NO: 720 | AGAGAUCCAAAGCAGGGGCUU | SEQ ID NO: 1363 | GCCGCUGCUUUGGAUCUCU | 0.047 |
| AH0077 | SEQ ID NO: 78 | CCGCUGCUUUGGAUCUCUGUC | SEQ ID NO: 721 | CAGAGAUCCAAAGCAGCGGGU | SEQ ID NO: 1364 | CCGCUGCUUUGGAUCUCUG | 0.054 |
| AH0078 | SEQ ID NO: 79 | CGGUGCUUUGGAUCUCUGUCC | SEQ ID NO: 722 | ACAGAGAUCCAAAGCAGCGGC | SEQ ID NO: 1365 | GGCUGGUUUGGAUCUCUGU | [symbol] |
| AH0079 | SEQ ID NO: 80 | GCUGGUUUGGAUGUCUGUCCU | SEQ ID NO: 723 | GACAGAGAUGCAAAGGAGGGG | SEQ ID NO: 1366 | GCUGCUUUGGAUCUCUGUC | [symbol] |
| AH0080 | SEQ ID NO: 81 | CUGCUUUGGAUCUCUGUCCUC | SEQ ID NO: 724 | GGAGAGAGAUCCAAAGCAGCG | SEQ ID NO: 1367 | GUGCUUUGGAUCUCUGUCC | [symbol] |
| AH0081 | SEQ ID NO: 82 | UGCUUUGGAUCUCUGUCCUGA | SEQ ID NO: 725 | AGGACAGAGAUCCAAAGCAGC | SEQ ID NO: 1368 | UGCUUUGGAUCUCUGUCCU | [symbol] |
| AH0082 | SEQ ID NO: 83 | GCUUUGGAUCUCUGUCCUCAC | SEQ ID NO: 726 | GAGGACAGAGAUCCAAAGCAG | SEQ ID NO: 1369 | GCUUUGGAUCUCUGUCCUC | [symbol] |
| AH0083 | SEQ ID NO: 84 | CUUUGGAUCUCUGUCCUCACC | SEQ ID NO: 727 | UGAUUACAGAGAUCCAAAGCA | SEQ ID NO: 1370 | CUUUGGAUCUCUGUCCUCA | 0.070 |
| AH0084 | SEQ ID NO: 85 | UUUGGAUCUCUGUCCUCACCA | SEQ ID NO: 728 | GUGAGGACAGAGAUCCAAAGC | SEQ ID NO: 1371 | UUUGGAUCUCUGUCCUCAC | [symbol] |
| AH0085 | SEQ ID NO: 86 | GGAUCUCUGUCCUCACCAGCC | SEQ ID NO: 729 | CUGGUGAGGACAGAGAUCCAA | SEQ ID NO: 1372 | GGAUCUCUGUCCUGAGCAG | 0.129 |
| AH0086 | SEQ ID NO: 87 | GAUCUCUGUCCUCAGCAGCCU | SEQ ID NO: 730 | GCUGGUGAGGACAGAGAUCCA | SEQ ID NO: 1373 | GAUCUCUGUCCUCACCAGC | [symbol] |
| AH0087 | SEQ ID NO: 88 | CUCUGUCCUCACCAGCCUCCU | SEQ ID NO: 731 | GAGGCUGGUGAGGACAGAGAU | SEQ ID NO: 1374 | CUCUGUCCUCACCAGCCUC | 0.283 |
| AH0088 | SEQ ID NO: 89 | CUGUCCUCACCAGCCUCGUGG | SEQ ID NO: 732 | AGGAGGCUGGUGAGGAGAGAG | SEQ ID NO: 1375 | CUGUCCUGACCAGCCUCCU | 0.413 |
| AH0089 | SEQ ID NO: 90 | UGUCCUCACGAGGCUCCUGGA | SEQ ID NO: 733 | CAGGAGGCUGGUGAGGACAGA | SEQ ID NO: 1376 | UGUCCUCACCAGCCUGCUG | 0.334 |
| AH0090 | SEQ ID NO: 91 | GUCCUGACCAGGCUGCUGGAA | SEQ ID NO: 734 | CCAGGAGGCUGGUGAGGACAG | SEQ ID NO: 1377 | GUCCUCACCAGCCUGGUGG | [symbol] |
| AH0091 | SEQ ID NO: 92 | UCCUCACCAGCCUCCUGGAAG | SEQ ID NO: 735 | UCCAGGAGGCUGGUGAGGACA | SEQ ID NO: 1378 | UCCUCACCAGCCUCCUGGA | 0.300 |
| AH0092 | SEQ ID NO: 93 | CUCACGAGCCUCCUGGAAGCC | SEQ ID NO: 736 | CUUCCAGGAGGCUGGUGAGGA | SEQ ID NO: 1379 | CUCACCAGCCUCCUGGAAG | 0.243 |
| AH0093 | SEQ ID NO: 94 | UCACCAGCCUCCUGGAAGCCU | SEQ ID NO: 737 | GCUUCCAGGAGGCUGGGGAGG | SEQ ID NO: 1380 | UCACCAGCCUCCUGGAAGC | [symbol] |
| AH0094 | SEQ ID NO: 95 | ACCAGCCUCCUGGAAGGGUUU | SEQ ID NO: 738 | AGGCUUCCAGGAGGCUGGUGA | SEQ ID NO: 1381 | ACCAGGGUCCUGGAACCCU | [symbol] |
| AH0095 | SEQ ID NO: 96 | CCAGGGUCCUGGAAGGGUUUG | SEQ ID NO: 739 | AAGGCUUCCAGGAGGCUGGUG | SEQ ID NO: 1382 | CCAGCCUUUUGGAAGCCUU | 0.080 |
| AH0096 | SEQ ID NO: 97 | CAGGGUCCUGGAAGCCUUUGC | SEQ ID NO: 740 | AAAGGCUUCCAGGAGGGUGGU | SEQ ID NO: 1383 | CAGCCUGGUGGAAGCCUUU | [symbol] |
| AH0097 | SEQ ID NO: 98 | AGCCUCCUGGAAGCCUUUGCU | SEQ ID NO: 741 | CAAAGGCUUCCAGGAGGCUGG | SEQ ID NO: 1384 | AGCCUCCUGGAAGCCUUUG | [symbol] |
| AH0098 | SEQ ID NO: 99 | GCCUCCUGGAAGCCUUUGCUC | SEQ ID NO: 742 | GCAAAGGUUUCCAGGAGGCUG | SEQ ID NO: 1385 | GCCUCCUGGAAGCCUUUGC | 0.374 |
| AH0099 | SEQ ID NO: 100 | CCUCCUGGAAGGGUUUGCUCA | SEQ ID NO: 743 | AGCAAAGGCUUCCAGGAGGCU | SEQ ID NO: 1386 | GGUCCUGGAAGCCUUUGCU | 0.111 |
| AH0100 | SEQ ID NO: 101 | CUCCUGGAAGCCUUUGCUCAC | SEQ ID NO: 744 | GAGCAAAGGCUUCCAGGAGGC | SEQ ID NO: 1387 | CUCCUGGAAGCCUUUGGUC | 0.310 |

[symbol]

indicates data missing or illegible when filed

TABLE 1-3

| Double-stranded | | Sense strand sequence | | Antisense strand | | Target APCS mRNA | Relative APCS |
|---|---|---|---|---|---|---|---|
| nucleic acid No. | SEQ ID NO: | (5′→3′) | SEQ ID NO: | sequence (5′→3′) | SEQ ID NO: | sequence | expression level |
| AH0101 | SEQ ID NO: 102 | UCCUGGAAGGGUUUGCUCACA | SEQ ID NO: 745 | UGAGCAAAGGCUUCCAGGAGG | SEQ ID NO: 1388 | UCCUGGAAGCCUUUGCUCA | 0.053 |
| AH0102 | SEQ ID NO: 103 | CCUGGAAGCCUUUGCUCACAC | SEQ ID NO: 746 | GUGAGCAAAGGCUUCCAGGAG | SEQ ID NO: 1389 | CCUGGAAGCCUUUGCUCAC | 0.086 |
| AH0103 | SEQ ID NO: 104 | CUGGAAGCCUUUCCUCACACA | SEQ ID NO: 747 | UCUGAGCAAAGGCUUCCAGGA | SEQ ID NO: 1390 | CUGGAAGCCUUUGCUCACA | 0.121 |
| AH0104 | SEQ ID NO: 105 | GGAAGCCUUUGCUCACACAGA | SEQ ID NO: 748 | UGUGUGAGCAAAGGCUUCCAG | SEQ ID NO: 1391 | GGAAGCCUUUGCUCACACA | 0.161 |
| AH0105 | SEQ ID NO: 106 | GAAGCCUUUGCUCACACAGAC | SEQ ID NO: 749 | CUGUGUGAGCAAAGGCUUCCA | SEQ ID NO: 1392 | GAAGCCUUUGCUGACAGAG | [symbol] |
| AH0106 | SEQ ID NO: 107 | AAGCCUUUGCUCACACAGACC | SEQ ID NO: 750 | UCUGUGUGAGCAAAGGCUUCC | SEQ ID NO: 1393 | AAGCCUUUGCUCACACAGA | [symbol] |
| AH0107 | SEQ ID NO: 108 | AGCCUUUGCUCACACAGACCU | SEQ ID NO: 751 | CUCUGUGUGAGCAAAGGCUUC | SEQ ID NO: 1394 | AGGGUUUGCUCACACAGAC | 0.138 |
| AH0108 | SEQ ID NO: 109 | GCCUUUGCUCACACAGACCUC | SEQ ID NO: 752 | GGUCUGUGUGAGCAAAGGCUU | SEQ ID NO: 1395 | CCGUUUGCUCACACAGACC | [symbol] |
| AH0109 | SEQ ID NO: 110 | CCUUUGCUCACACAGACCUCA | SEQ ID NO: 753 | AGGUCUGUGUGAGCAAAGGCU | SEQ ID NO: 1396 | CCUUUGCUCACACAGACCU | 0.107 |
| AH0110 | SEQ ID NO: 111 | CUUUGCUCACACAGACCUCAG | SEQ ID NO: 754 | GAGGUCUGUGUGAGCAAAGGC | SEQ ID NO: 1397 | CUUUGCUGACACAGACCUC | [symbol] |
| AH0111 | SEQ ID NO: 112 | UUUGCUCACACAGACCUCAGU | SEQ ID NO: 755 | UGAGGUCUGUGUGAGCAAAGG | SEQ ID NO: 1398 | UUUGCUCACACAGACCUCA | [symbol] |
| AH0112 | SEQ ID NO: 113 | UGCUCACACAGACCUCAGUGG | SEQ ID NO: 756 | ACUGAGGUCUGUGUCACCAAA | SEQ ID NO: 1399 | UGCUGACACAGACCUCAGU | 0.302 |
| AH0113 | SEQ ID NO: 114 | CUCACACAGACCUCAGUGGGA | SEQ ID NO: 757 | CCACUGAGGUCUGUGUGAGCA | SEQ ID NO: 1400 | CUCACACAGACCUCAGUGG | [symbol] |
| AH0114 | SEQ ID NO: 115 | CACACAGACCUCAGUGGGAAG | SEQ ID NO: 758 | UCCCACUGAGGUCUGUGUGAG | SEQ ID NO: 1401 | CACACAGACCUCAGUGGGA | [symbol] |
| AH0115 | SEQ ID NO: 116 | ACACAGACCUCAGUGGGAAGG | SEQ ID NO: 759 | UUCCCACUGAGGUCUGUGUGA | SEQ ID NO: 1402 | ACACAGACCUCAGUGGGAA | [symbol] |
| AH0116 | SEQ ID NO: 117 | CACAGACCUCAGUGGGAAGGU | SEQ ID NO: 760 | CUUCCCACUGAGGUCUGGGUG | SEQ ID NO: 1403 | CACAGACCUCAGUGGGAAG | [symbol] |
| AH0117 | SEQ ID NO: 118 | AGACCUCAGUGGGAAGGUGUU | SEQ ID NO: 761 | CACCUUCCCACUGAGGUCUGU | SEQ ID NO: 1404 | AGACCUCAGUGGGAAGGUG | [symbol] |
| AH0118 | SEQ ID NO: 119 | GACCUCAGUGGGAAGGUGUUU | SEQ ID NO: 762 | ACACCUUCCCACUGAGGUCUG | SEQ ID NO: 1405 | GACCUCAGUGGGAAGGUGU | 0.149 |
| AH0119 | SEQ ID NO: 120 | ACCUCAGUGGGAAGGUGUUUG | SEQ ID NO: 763 | AACACCUUCCCACUGAGGUCU | SEQ ID NO: 1406 | ACCUCAGUGGGAAGGGGUU | 0.123 |
| AH0120 | SEQ ID NO: 121 | CCUCAGUGGGAAGGUGUUUGU | SEQ ID NO: 764 | AAACACCUUCCCACUGAGGUC | SEQ ID NO: 1407 | CCUCAGUGGGAAGGUGUUU | [symbol] |
| AH0121 | SEQ ID NO: 122 | CUCAGUGGGAAGGUGUUUGUA | SEQ ID NO: 765 | ACAAACACCUUCCCACUGAGG | SEQ ID NO: 1408 | CUCAGUGGGAAGGUGUUUG | 0.318 |
| AH0122 | SEQ ID NO: 123 | UCAGUGGGAAGGUGUUUGUAU | SEQ ID NO: 766 | ACAAACACCUUCCCACUGAGG | SEQ ID NO: 1409 | UCAGUGGGAAGGUGUUUGU | 0.125 |
| AH0123 | SEQ ID NO: 124 | CAGUGGGAAGGUGUUUGUAUU | SEQ ID NO: 767 | UACAAACACCUUCCCACUGAG | SEQ ID NO: 1410 | CAGUGGGAAGGUGUUUGUA | 0.135 |
| AH0124 | SEQ ID NO: 125 | AGUGGGAAGGUGUUUGUAUUU | SEQ ID NO: 768 | AUACAAAGAGGUUCCCACUGA | SEQ ID NO: 1411 | AGUGGGAAGGUGUUUGUAU | 0.105 |
| AH0125 | SEQ ID NO: 126 | GUGGGAAGGUGUUUGUAUUUC | SEQ ID NO: 769 | AAUACAAACACCUUCCCACUG | SEQ ID NO: 1412 | GUGGGAAGGUGUUUGUAUU | 0.101 |
| AH0126 | SEQ ID NO: 127 | UGGGAAGGUGUUUGUAUUUCC | SEQ ID NO: 770 | AAAUACAAACACCUUCCCACU | SEQ ID NO: 1413 | UGGGAAGGUGUUUGUAUUU | 0.150 |
| AH0127 | SEQ ID NO: 128 | GGGAAGGUGUUUGUAUUUCCU | SEQ ID NO: 771 | GAAAUACAAAGACCUUCCCAC | SEQ ID NO: 1414 | GGGAAGGUGUUUGUAUUUG | [symbol] |
| AH0128 | SEQ ID NO: 129 | GGAAGGUGUUUGUAUUUCCUA | SEQ ID NO: 772 | GGAAAUACAAACACCUUCCCA | SEQ ID NO: 1415 | GGAAGGUGUUUGUAUUUCC | 0.127 |
| AH0129 | SEQ ID NO: 130 | GAAGGUGUUUGUAUUUCCUAG | SEQ ID NO: 773 | AGGAAAUAGAAACACCUUCCC | SEQ ID NO: 1416 | GAAGGUGUUUGUAUUUCCU | 0.077 |
| AH0130 | SEQ ID NO: 131 | AAGGUGGUUGUAUUUCCUAGA | SEQ ID NO: 774 | UAGGAAAUAGAAACACCUUCC | SEQ ID NO: 1417 | AAGGUGUUUGUAUUUCCUA | 0.213 |
| AH0131 | SEQ ID NO: 132 | AGGUGUUUGUAUUUCCUAGAG | SEQ ID NO: 775 | CUAGGAAAUACAAACACCUUG | SEQ ID NO: 1418 | AGGUGUUUGUAUUUCCUAG | 0.084 |
| AH0132 | SEQ ID NO: 133 | GGUGUUUGUAUUUCCUAGAGA | SEQ ID NO: 776 | UGUAGGAAAUACAAACACCUU | SEQ ID NO: 1419 | GGUGUUUGUAUUUCCUAGA | 0.112 |
| AH0133 | SEQ ID NO: 134 | GUGUUUGUAUUUCCUAGAGAA | SEQ ID NO: 777 | CUCUAGGAAAUACAAACACCU | SEQ ID NO: 1420 | GUGUUUGUAUUUCCUAGAG | [symbol] |
| AH0134 | SEQ ID NO: 135 | UGUUUGUAUUUCCUAGAGAAU | SEQ ID NO: 778 | UCUCUAGGAAAUACAAACACC | SEQ ID NO: 1421 | UGUUUGUAUUUCCUAGAGA | [symbol] |
| AH0135 | SEQ ID NO: 136 | GUUUGUAUUUCCUAGAGAAUC | SEQ ID NO: 779 | UUCUCUAGGAAAUACAAACAC | SEQ ID NO: 1422 | GUUUGUAUUUCCUAGAGAA | 0.070 |
| AH0136 | SEQ ID NO: 137 | UUUGUAUUUCCUAGAGAAUCU | SEQ ID NO: 780 | AUUCUCUAGGAAAUACAAACA | SEQ ID NO: 1423 | UUUGUAUUUCCUAGAGAAU | 0.125 |
| AH0137 | SEQ ID NO: 138 | UUGUAUUUCCUAGAGAAUCUG | SEQ ID NO: 781 | GAUUCUCUAGGAAAUACAAAC | SEQ ID NO: 1424 | UUGUAUUUCCUAGAGAAUC | 0.451 |
| AH0138 | SEQ ID NO: 139 | UGUAUUUCCUAGAGAAUCUGU | SEQ ID NO: 782 | AGAUUCUCUAGGAAAUACAAA | SEQ ID NO: 1425 | UGUAUUUCCUAGAGAAUCU | 0.204 |
| AH0139 | SEQ ID NO: 140 | GUAUUUCCUAGAGAAUCUGUU | SEQ ID NO: 783 | GAGAUUCUCUAGGAAAUAGAA | SEQ ID NO: 1426 | GUAUUUCCUAGAGAAUCUG | 0.071 |
| AH0140 | SEQ ID NO: 141 | UAUUUCCUAGAGAAUCUGUUA | SEQ ID NO: 784 | ACAGAUUCUCUAGGAAAUACA | SEQ ID NO: 1427 | UAUUUCCUAGAGAAUCUGU | [symbol] |
| AH0141 | SEQ ID NO: 142 | AUUUCCUAGAGAAUCUGUUAC | SEQ ID NO: 785 | AACAGAUUCUCUAGGAAAUAG | SEQ ID NO: 1428 | AUUUGGUAGAGAAUCUGUU | 0.123 |
| AH0142 | SEQ ID NO: 143 | UUUCCUAGAGAAUCUGUUACU | SEQ ID NO: 786 | UAACAGAUUCUCUAGGAAAUA | SEQ ID NO: 1429 | UUUCCUAGAGAAUCUGUUA | 0.179 |
| AH0143 | SEQ ID NO: 144 | UCCUAGAGAAUCUGUUACUGA | SEQ ID NO: 787 | AGUAACAGAUUCUCUAGGAAA | SEQ ID NO: 1430 | UCCUAGAGAAUCUGUUACU | [symbol] |
| AH0144 | SEQ ID NO: 145 | CCUAGAGAAUCUGUUACUGAU | SEQ ID NO: 788 | GAGUAAGAGAUUCUCUAGGAA | SEQ ID NO: 1431 | CCUAGAGAAUCUGUUACUG | [symbol] |
| AH0145 | SEQ ID NO: 146 | CUAGAGAAUCUGUUACUGAUC | SEQ ID NO: 789 | UCAGUAACAGAUUCUCUAGGA | SEQ ID NO: 1432 | CUAGAGAAUCUGUUACUGA | [symbol] |
| AH0146 | SEQ ID NO: 147 | UAGAGAAUCUGUUACUGAUCA | SEQ ID NO: 790 | AUCAGUAAGAGAUUCUCUAGG | SEQ ID NO: 1433 | UAGAGAAUCUGUUACUGAU | [symbol] |
| AH0147 | SEQ ID NO: 148 | AGAGAAUCUGUUACUGAUCAU | SEQ ID NO: 791 | GAUCAGUAACAGAUUCUCUAG | SEQ ID NO: 1434 | AGAGAAUCUGUUACUGAUC | [symbol] |
| AH0148 | SEQ ID NO: 149 | GAGAAUCUGUUACUGAUCAUG | SEQ ID NO: 792 | UGAUCAGUAACAGAUUCUCUA | SEQ ID NO: 1435 | GAGAAUCUGUUACUGAUCA | 0.030 |
| AH0149 | SEQ ID NO: 150 | AGAAUCUGUUACUGAUCAUGU | SEQ ID NO: 793 | AUGAUCAGUAACAGAUUCUCU | SEQ ID NO: 1436 | AGGAUCUGUUACUGAUCAU | 0.211 |
| AH0150 | SEQ ID NO: 151 | GAAUGUGUUACUGAUCAUGUA | SEQ ID NO: 794 | CAUGAUCAGUAACAGAUUCUC | SEQ ID NO: 1437 | GAAUCUGUUACUGAUCAUG | 0.183 |

[symbol]

indicates data missing or illegible when filed

TABLE 1-4

| Double-stranded | | Sense strand sequence | | Antisense strand | | Target APCS mRNA | Relative APCS |
|---|---|---|---|---|---|---|---|
| nucleic acid No. | SEQ ID NO: | (5′→3′) | SEQ ID NO: | sequence (5′→3′) | SEQ ID NO: | sequence | expression level |
| AH0151 | SEQ ID NO: 152 | AAUCUGUUAGUGAUCAUGUAA | SEQ ID NO: 795 | ACAUGAUCAGUAACAGAUUCU | SEQ ID NO: 1438 | AAUCUGUUACUGAUGAUGU | 0.477 |
| AH0152 | SEQ ID NO: 153 | AUCUGUUACUGAUCAUGUAAA | SEQ ID NO: 796 | UACAUGAUCAGUAACAGAUUC | SEQ ID NO: 1439 | AUCUGUUACUGAUCAUGUA | 0.103 |
| AH0153 | SEQ ID NO: 154 | UCUGUUACUGAUCAUGUAAAC | SEQ ID NO: 797 | UUACAUGAUCAGUAACAGAUU | SEQ ID NO: 1440 | UCUGUUACUGAUCAUGUAA | 0.186 |
| AH0154 | SEQ ID NO: 155 | CUGUUACUGAUCAUGUAAACU | SEQ ID NO: 798 | UUUACAUGAUCAGUAACAGAU | SEQ ID NO: 1441 | CUGUUACUGAUCAUGUAAA | 0.155 |
| AH0155 | SEQ ID NO: 156 | UGUUACUGAUCAUGUAAACUU | SEQ ID NO: 799 | GUUUACAUGAUCAGUAACAGA | SEQ ID NO: 1442 | UGUUACUGAUCAUGUAAAC | 0.260 |
| AH0156 | SEQ ID NO: 157 | GUUACUGAUCAUGUAAACUUG | SEQ ID NO: 800 | AGUUUACAUGAUCAGUAACAG | SEQ ID NO: 1443 | GUUACUGAUCAUGUAAACU | 0.213 |
| AH0157 | SEQ ID NO: 158 | ACUGAUCAUGUAAACUUGAUC | SEQ ID NO: 801 | UCAAGUUUACAUGAUCAGUAA | SEQ ID NO: 1444 | ACUGAUCAUGUAAACUUGA | 0.385 |
| AH0158 | SEQ ID NO: 159 | CUGAUCAUGUAAACUUGAUCA | SEQ ID NO: 802 | AUCAAGUUUACAUGAUCAGUA | SEQ ID NO: 1445 | CUGAUCAUGUAAACUUGAU | [symbol] |
| AH0159 | SEQ ID NO: 160 | UGAUCAUGUAAACUUGAUCAC | SEQ ID NO: 803 | GAUCAAGUUUACAUGAUCAGU | SEQ ID NO: 1446 | UGAUGAUGUAAACUUGAUC | 0.457 |
| AH0160 | SEQ ID NO: 161 | GAUCAUGUAAACUUGAUCACA | SEQ ID NO: 804 | UGAUCAAGUUUACAUGAUCAG | SEQ ID NO: 1447 | GAUCAUGUAAACUUGAUCA | [symbol] |
| AH0161 | SEQ ID NO: 162 | UCAUGUAAACUUGAUCACACC | SEQ ID NO: 805 | UGUCAUCAACUUUACAUGAUC | SEQ ID NO: 1448 | UCAUGUAAACUUGAUCACA | [symbol] |
| AH0162 | SEQ ID NO: 163 | CAUGUAAACUUGAUCACACCG | SEQ ID NO: 806 | GUGUGAUCAAGUUUACAUGAU | SEQ ID NO: 1449 | CAUGUAAAUUUGAUCACAC | [symbol] |
| AH0163 | SEQ ID NO: 164 | UAAACUUGAUCACACCGGUGG | SEQ ID NO: 807 | ACCGGUGUGAUCAAGUUUACA | SEQ ID NO: 1450 | UAAACUUGAUCACACCGCU | 0.355 |
| AH0164 | SEQ ID NO: 165 | AAACUUGAUCACACCGCUGGA | SEQ ID NO: 808 | CAGCGGUGUGAUCAAGUUUAC | SEQ ID NO: 1451 | AAACUUGAUCACACCGCUG | [symbol] |
| AH0165 | SEQ ID NO: 166 | ACUUGAUCACACCGCUGGAGA | SEQ ID NO: 809 | UCCAGCGGUGUGAUCAAGUUU | SEQ ID NO: 1452 | ACUUGAUCACACCGCUGGA | 0.212 |
| AH0166 | SEQ ID NO: 167 | UUGAUCACACCGCUGGAGAAG | SEQ ID NO: 810 | UCUCCAGCGGUGUGAUCAAGU | SEQ ID NO: 1453 | UUGAUCACACCGCUGGAGA | [symbol] |
| AH0167 | SEQ ID NO: 168 | UGAUCACACCGCUGGAGAAGC | SEQ ID NO: 811 | UUCUCCAGCGGUGUGAUCAAG | SEQ ID NO: 1454 | UGAUCACACCGCUGGAGAA | [symbol] |
| AH0168 | SEQ ID NO: 169 | GAUCACACCGCUGGAGAAGCC | SEQ ID NO: 812 | CUUCUCCAGCCGUGUGAUCAA | SEQ ID NO: 1455 | GAUCACAGGGCUGGAGAAG | [symbol] |
| AH0169 | SEQ ID NO: 170 | CACACCGCUGGAGAAGCCUCU | SEQ ID NO: 813 | AGGCUUCUCCAGCGGUGUGAU | SEQ ID NO: 1456 | CACACCGCUGGAGAAGCCU | 0.312 |
| AH0170 | SEQ ID NO: 171 | ACACCGCUGGAGAAGCCUCUA | SEQ ID NO: 814 | GAGGCUUCUCCAGCGGUGUGA | SEQ ID NO: 1457 | ACACCGCUGGAGAAGCCUC | [symbol] |
| AH0171 | SEQ ID NO: 172 | CACCGCUGGAGAAGCCUCUAC | SEQ ID NO: 815 | AGAGGCUUCUCCAGCGGUGUG | SEQ ID NO: 1458 | CACCGCUGGAGAAGCCUCU | [symbol] |
| AH0172 | SEQ ID NO: 173 | ACCGCUGGAGAAGCCUCUACA | SEQ ID NO: 816 | UAGAGGCUUCUCCAGCGGUGU | SEQ ID NO: 1459 | ACCGCUGGAGAAGCGUCUA | 0.276 |
| AH0173 | SEQ ID NO: 174 | CCGCUGGAGAAGCCUCUACAG | SEQ ID NO: 817 | GUAGAGGCUUCUCCAGCGGUG | SEQ ID NO: 1460 | CCGCUGGAGAAGCCUCUAC | [symbol] |
| AH0174 | SEQ ID NO: 175 | CGCUGGAGAAGCCUCUACAGA | SEQ ID NO: 818 | UGUAGAGGCUUCUCCACCGGU | SEQ ID NO: 1461 | CGCUGGAGAAGCCUCUACA | 0.056 |
| AH0175 | SEQ ID NO: 176 | GCUGGAGAAGCCUCUACAGAA | SEQ ID NO: 819 | CUGUAGAGGCUUCUCCAGCGG | SEQ ID NO: 1462 | GCUGGAGAAGCCUCUACAG | [symbol] |
| AH0176 | SEQ ID NO: 177 | CUGGAGAAGGCUCUACAGAAC | SEQ ID NO: 820 | UCUGUAGAGGCUUCUCCAGCG | SEQ ID NO: 1463 | CUGGAGAAGCCUCUAGAGA | 0.080 |
| AH0177 | SEQ ID NO: 178 | UGGAGAAGCCUCUACAGAACU | SEQ ID NO: 821 | UUCUGUAGAGGCUUCUCCAGC | SEQ ID NO: 1464 | UGGAGAAGCCUCUACAGAA | 0.088 |
| AH0178 | SEQ ID NO: 179 | GGAGGAGCCUCUACAGAACUU | SEQ ID NO: 822 | GUUCUGUAGAGGCUUCUCCAG | SEQ ID NO: 1465 | GGAGAAGCCUCUACAGAAC | 0.142 |
| AH0179 | SEQ ID NO: 180 | GAGAAGCCUCUACAGAACUUU | SEQ ID NO: 823 | AGUUCUGUAGAGGCUUCUCCA | SEQ ID NO: 1466 | GAGAAGCCUCUACAGAACU | 0.276 |
| AH0180 | SEQ ID NO: 181 | ACAAGCCUCUACAGAAGUUUA | SEQ ID NO: 824 | AAGUUCUGUAGAGGCUUCUCC | SEQ ID NO: 1467 | AGAAGCCUCUACAGAACUU | [symbol] |
| AH0181 | SEQ ID NO: 182 | GAAGCCUCUACAGAACUUUAC | SEQ ID NO: 825 | AAAGUUCUGUAGAGGCUUCUC | SEQ ID NO: 1468 | GAAGCCUCUACAGAACUUU | 0.156 |
| AH0182 | SEQ ID NO: 183 | AAGCCUCUACAGAACUUUACC | SEQ ID NO: 826 | UAAAGUUCUGUAGAGGCUUCU | SEQ ID NO: 1469 | AAGCCUGUACAGAACUUUA | 0.210 |
| AH0183 | SEQ ID NO: 184 | AGCCUCUACAGAACUUUACCU | SEQ ID NO: 827 | GUAAAGUUGUGUAGAGGUUUC | SEQ ID NO: 1470 | AGCCUCUAGAGAACUUUAC | 0.305 |
| AH0184 | SEQ ID NO: 185 | GCCUCUACAGAACUUUACCUU | SEQ ID NO: 828 | GGUAAAGUUCUGUAGAGGUUU | SEQ ID NO: 1471 | GCCUCUAGAGAACUUUACC | 0.343 |
| AH0185 | SEQ ID NO: 186 | CCUCUACAGAACUUUACCUUG | SEQ ID NO: 829 | AGGUAAAGUUCUCUAGAGGGU | SEQ ID NO: 1472 | CCUCUACAGAACUUUAGGU | 0.178 |
| AH0186 | SEQ ID NO: 187 | CUCUACAGAACUUUACCUUGU | SEQ ID NO: 830 | AAGGUAAAGUUCUGUAGAGGC | SEQ ID NO: 1473 | CUCUACAGAACUUUACCUU | 0.183 |
| AH0187 | SEQ ID NO: 188 | UCUACAGAACUUUACCUUGUG | SEQ ID NO: 831 | CAAGGUAAAGUUGUGUAGAGG | SEQ ID NO: 1474 | UCUAGAGAAGUUUACCUUG | 0.244 |
| AH0188 | SEQ ID NO: 189 | CUACAGAACUUUACCUUGUGU | SEQ ID NO: 832 | ACAAGGUAAAGUUCUGUAGAG | SEQ ID NO: 1475 | CUACAGAACUUUACCUUGU | 0.079 |
| AH0189 | SEQ ID NO: 190 | UACAGAACUUUACCUUGUGUU | SEQ ID NO: 833 | CACAAGGUAAAGUUCUGUAGA | SEQ ID NO: 1476 | UACAGAACUUUACCUUGUG | 0.219 |
| AH0190 | SEQ ID NO: 191 | ACAGAACUUUACCUUGUGUUU | SEQ ID NO: 834 | ACACAAGGUAAAGUUCUGUAG | SEQ ID NO: 1477 | ACAGAACUUUACCUUGUGU | 0.387 |
| AH0191 | SEQ ID NO: 192 | CAGAACUUUACCUUGUGUUUU | SEQ ID NO: 835 | AACACAAGGUAAAGUUCUGUA | SEQ ID NO: 1478 | CAGAACUUUACCUUGUGUU | 0.171 |
| AH0192 | SEQ ID NO: 193 | AGAACUUUACCUUGUGUUUUC | SEQ ID NO: 836 | AAACACAAGGUAAAGUUCUGU | SEQ ID NO: 1479 | AGAACUUUACCUUGUGUUU | 0.133 |
| AH0193 | SEQ ID NO: 194 | GAACUUUACCUUGUGUUUUCG | SEQ ID NO: 837 | AAAACACAAGGUAAAGUUCUG | SEQ ID NO: 1480 | GAACUUUACCUUGUGUUUU | 0.031 |
| AH0194 | SEQ ID NO: 195 | AACUUUACCUUGUGUUUUCGA | SEQ ID NO: 838 | GAAAAGAGAAGGUAAAGUUCU | SEQ ID NO: 1481 | AACUUUACCUUGUGUUUUC | 0.347 |
| AH0195 | SEQ ID NO: 196 | CUUUACCUUGUGUUUUCGAGC | SEQ ID NO: 839 | UCGAAAACACAAGGUAAAGUU | SEQ ID NO: 1482 | CUUUACCUUGUGUUUUCGA | 0.453 |
| AH0196 | SEQ ID NO: 197 | ACCUUGUGUUUUCGAGCCUAU | SEQ ID NO: 840 | AGGCUCGAAAACACAAGGUAA | SEQ ID NO: 1483 | ACCUUGUGUUUUCGAGCCU | 0.184 |
| AH0197 | SEQ ID NO: 198 | CCUUGUGUUUUCGAGCCUAUA | SEQ ID NO: 841 | UAGGGUCGAAAAGAGAAGGUA | SEQ ID NO: 1484 | CCUUGUGUUUUGGAGCCUA | 0.081 |
| AH0198 | SEQ ID NO: 199 | CUUGUGUUUUCGAGCCUAUAG | SEQ ID NO: 842 | AUAGGCUCGAAAACACAAGGU | SEQ ID NO: 1485 | CUUGUGUUUUCGAGCCUAU | 0.110 |
| AH0199 | SEQ ID NO: 200 | UUGUGUUUUCGAGCCUAUAGU | SEQ ID NO: 843 | UAUAGGCUCGAAAACACAAGG | SEQ ID NO: 1486 | UUGUGUUUUCGAGCCUAUA | 0.137 |
| AH0200 | SEQ ID NO: 201 | GUGUUUUCGAGCCUAUAGUGA | SEQ ID NO: 844 | ACUAUAGGCUCGAAAACACAA | SEQ ID NO: 1487 | GUGUUUUCGAGCCUAUAGU | 0.125 |

[symbol]

indicates data missing or illegible when filed

TABLE 1-5

| Double-stranded | | Sense strand sequence | | Antisense strand | | Target APCS mRNA | Relative APCS |
|---|---|---|---|---|---|---|---|
| nucleic acid No. | SEQ ID NO: | (5′→3′) | SEQ ID NO: | sequence (5′→3′) | SEQ ID NO: | sequence | expression level |
| AH0201 | SEQ ID NO: 202 | GUUUUCGAGCCUAUAGUGAUC | SEQ ID NO: 845 | UCACUAUAGGCUCGAAAACAC | SEQ ID NO: 1488 | GUUUUCGAGCCUAUAGUGA | 0.074 |
| AH0202 | SEQ ID NO: 203 | UUUUCGAGCCUAUAGUGAUCU | SEQ ID NO: 846 | AUCACUAUAGGCUCGAAAACA | SEQ ID NO: 1489 | UUUUCGAGCCUAUAGUGAU | 0.136 |
| AH0203 | SEQ ID NO: 204 | CGAGCCUAUAGUGAUCUCUCU | SEQ ID NO: 847 | AGAGAGCACUAUAGGCUCGAA | SEQ ID NO: 1490 | CGAGCCUAUAGUGAUCUCU | 0.119 |
| AH0204 | SEQ ID NO: 205 | GAGCCUAUAGUGAUGUCUCUC | SEQ ID NO: 848 | GAGAGAUCACUAUAGGCUCGA | SEQ ID NO: 1491 | GAGCCUAUAGUGAUCUCUC | 0.127 |
| AH0205 | SEQ ID NO: 206 | AGCCUAUAGUGAUCUCUCUCG | SEQ ID NO: 849 | AGAGAGAUCACUAUAGGCUCG | SEQ ID NO: 1492 | AGCCUAGAGUGAUCUCUCU | [symbol] |
| AH0206 | SEQ ID NO: 207 | GGCUAUAGUGAUCUCUCUCGU | SEQ ID NO: 850 | GAGAGAGAUCACUAUAGGCUC | SEQ ID NO: 1493 | GGUAUAGUAGAUCUCUCUC | 0.090 |
| AH0207 | SEQ ID NO: 208 | CCUAUAGUGAUCUCUCUCGUG | SEQ ID NO: 851 | CGAGAGAGAUCACUAUAGGCU | SEQ ID NO: 1494 | CCUAUAGUGAUCUCUCUCG | 0.287 |
| AH0208 | SEQ ID NO: 209 | CUAUAGUGAUCUCUCUCGUGG | SEQ ID NO: 852 | ACGAGAGAGAUCACUAUAGGC | SEQ ID NO: 1495 | CUAUAGUGAUCUCUCUCGU | [symbol] |
| AH0209 | SEQ ID NO: 210 | UAUAGUGAUCUCUCUCGUGCC | SEQ ID NO: 853 | CACGAGAGAGAUCACUAUAGG | SEQ ID NO: 1496 | UAUAGUGAUCUCUCUCGUG | [symbol] |
| AH0210 | SEQ ID NO: 211 | AGUGAUCUCUCUUGUGCCUAC | SEQ ID NO: 854 | AGGCACGAGAGAGAUCACUAU | SEQ ID NO: 1497 | AGUGAUCUCUCUCGUGCCU | [symbol] |
| AH0211 | SEQ ID NO: 212 | GUGAUCUCUCUCGUGCCUACA | SEQ ID NO: 855 | UAGGCAGGAGAGAGAUCACUA | SEQ ID NO: 1498 | GUGAUCUCUCUCGUGCCUA | 0.072 |
| AH0212 | SEQ ID NO: 213 | UGAUCUCUCUCGUGCCUACAG | SEQ ID NO: 856 | GUAGGCACGAGAGAGAUCACU | SEQ ID NO: 1499 | UGAUCUCUCUCGUGCCUAC | [symbol] |
| AH0213 | SEQ ID NO: 214 | GAUCUCUCUCGUGCCUACAGG | SEQ ID NO: 857 | UGUAGGCACGAGAGAGAUCAC | SEQ ID NO: 1500 | GAUCUCUCUCGUGCCUAGA | 0.126 |
| AH0214 | SEQ ID NO: 215 | CUCUCGUGCCUACAGCCUCUU | SEQ ID NO: 858 | GAGGCUGUAGGCACGAGAGAG | SEQ ID NO: 1501 | CUCUCGUGCCUACAGCCUC | 0.198 |
| AH0215 | SEQ ID NO: 216 | UGUCGUGCCUACAGCCUCUUC | SEQ ID NO: 859 | AGAGGCUGUAGGCACGAGAGA | SEQ ID NO: 1502 | UCUCGUGCCUAGAGCCUCU | 0.140 |
| AH0216 | SEQ ID NO: 217 | CUCGUGCCUACAGCCUCUUCU | SEQ ID NO: 860 | AAGAGGCUGUAGGCACGAGAG | SEQ ID NO: 1503 | CUGGUGCCUAGAGCCUCUU | [symbol] |
| AH0217 | SEQ ID NO: 218 | CGUGCCUACAGCCUCUUCUCC | SEQ ID NO: 861 | AGAAGAGGCUCUAGGCACGAG | SEQ ID NO: 1504 | CGUGCCUACAGCCUCUUCU | 0.181 |
| AH0218 | SEQ ID NO: 219 | GUGCCUACAGGCUCUUCUGCU | SEQ ID NO: 862 | GAGAAGAGGCUCUAGGCACGA | SEQ ID NO: 1505 | GUGCCUACAGCGUCUUCUC | 0.101 |
| AH0219 | SEQ ID NO: 220 | GCCUACAGCCUCUUCUCCUAC | SEQ ID NO: 863 | AGGAGAAGAGGCUGUAGGCAC | SEQ ID NO: 1506 | GCCUACAGCCUCUUCUCCU | 0.100 |
| AH0220 | SEQ ID NO: 221 | GGUACAGCCUCUUCUCCUACA | SEQ ID NO: 864 | UAGGAGAAGAGGCUGUAGGCA | SEQ ID NO: 1507 | CCUACAGCCUCUUCUCCUA | [symbol] |
| AH0221 | SEQ ID NO: 222 | CUACAGCCUCUUCUCCUACAA | SEQ ID NO: 865 | GUAGGAGAAGAGGCUGUAGGC | SEQ ID NO: 1508 | CUACAGCCUCUUCUCCUAC | 0.153 |
| AH0222 | SEQ ID NO: 223 | UACAGCCUCUUCUCCUACAAU | SEQ ID NO: 866 | UGUAGGAGAAGAGGCUGUAGG | SEQ ID NO: 1509 | UACAGCCUCUUCUCCUACA | 0.221 |
| AH0223 | SEQ ID NO: 224 | ACAGCCUCUUGUCCUACAAUA | SEQ ID NO: 867 | UUGUAGGAGAAGAGGCUGUAG | SEQ ID NO: 1510 | ACAGCCUCUUCUCCUACAA | [symbol] |
| AH0224 | SEQ ID NO: 225 | CAGCCUCUUCUCCUACAAUAC | SEQ ID NO: 868 | AUUGUAGGAGAAGAGGCUGUA | SEQ ID NO: 1511 | CAGCCUCUUCUCCUACAAU | [symbol] |
| AH0225 | SEQ ID NO: 226 | AGGGUCUUCUCCUACAAUACC | SEQ ID NO: 869 | UAUUGUAGGAGAAGAGGCUGU | SEQ ID NO: 1512 | AGGGUGUUCUCCUACAAUA | 0.036 |
| AH0226 | SEQ ID NO: 227 | GCCUCUUCUCCUACAAUACCC | SEQ ID NO: 870 | GUAUUGUAGGAGAAGAGGCUG | SEQ ID NO: 1513 | GCCUCUUCUCCUACAAUAC | 0.172 |
| AH0227 | SEQ ID NO: 228 | CCUCUUCUCCUACAAUACCCA | SEQ ID NO: 871 | GGUAUUGUAGGAGAAGAGGCU | SEQ ID NO: 1514 | CCUCUUCUGCUACAAUACC | 0.116 |
| AH0228 | SEQ ID NO: 229 | UCUUCUCCUACAAUACCCAAG | SEQ ID NO: 872 | UGGGUAUUGUAGGAGAAGAGG | SEQ ID NO: 1515 | UCUUCUCCUACAAUACCCA | 0.430 |
| AH0229 | SEQ ID NO: 230 | UGUCCUACAAUACCCAAGGCA | SEQ ID NO: 873 | CCUUGGGUAUUGUAGGAGAAG | SEQ ID NO: 1516 | UCUCCUACAAUACCCAAGG | 0.438 |
| AH0230 | SEQ ID NO: 231 | CUCCUACAAUACCCAAGGCAG | SEQ ID NO: 874 | GCCUUGGGUAUUGUAGGAGAA | SEQ ID NO: 1517 | CUCCUACAAUACCCAAGGC | 0.303 |
| AH0231 | SEQ ID NO: 232 | UCCUACAAUACCCAAGGCAGG | SEQ ID NO: 875 | UGCCUUGGGUAUUGUAGGAGA | SEQ ID NO: 1518 | UCCUACAAUACCCAAGGCA | [symbol] |
| AH0232 | SEQ ID NO: 233 | CCUACAAUACCCAAGGCAGGG | SEQ ID NO: 876 | CUCCCUUGGGUAUUGUAGGAG | SEQ ID NO: 1519 | CCUACAAUACCCAAGGGAG | 0.324 |
| AH0233 | SEQ ID NO: 234 | CUAGAAUACCCAAGGCAGGGA | SEQ ID NO: 877 | CCUGCCUUGGGUAUUGUAGGA | SEQ ID NO: 1520 | CUACAAUACCCAAGGCAGG | 0.223 |
| AH0234 | SEQ ID NO: 235 | CAAUACCCAAGGCAGGGAUAA | SEQ ID NO: 878 | AUGGGUGCCUUGGGUAUUGUA | SEQ ID NO: 1521 | GAAUAGGGAAGGCAGGGAU | 0.323 |
| AH0235 | SEQ ID NO: 236 | AUACCCAAGGCAGGGAUAAUG | SEQ ID NO: 879 | UUAUCGGUGCCUUGGGUAUUG | SEQ ID NO: 1522 | AUACCCAAGGGAGGGAUAA | 0.207 |
| AH0236 | SEQ ID NO: 237 | UACCCAAGGGAGGGAUAAUGA | SEQ ID NO: 880 | AUUAUCCCUCCGUUGGGUAUU | SEQ ID NO: 1523 | UACCCAAGCCAGGGAUAAU | [symbol] |
| AH0237 | SEQ ID NO: 238 | CCAAGGCAGGGAUAAUGAGCU | SEQ ID NO: 881 | CUCAUUAUCCCUGCCUUGGGG | SEQ ID NO: 1524 | CCAAGGCAGGGAUAAUGAG | 0.424 |
| AH0238 | SEQ ID NO: 239 | AAGGCAGGGAUAAUGAGCUAC | SEQ ID NO: 882 | AGCUCAUUAUCCCUGCCUUGG | SEQ ID NO: 1525 | AAGGCAGGGAUAAUGAGCU | 0.172 |
| AH0239 | SEQ ID NO: 240 | AGGCAGGGAUAAUGAGCUACU | SEQ ID NO: 883 | UAGCUCAUUAUCCCUGCCUUG | SEQ ID NO: 1526 | AGGCAGGGAUAAUGAGCUA | [symbol] |
| AH0240 | SEQ ID NO: 241 | GGAGGGAUAAUGAGCUACUAG | SEQ ID NO: 884 | AGUAGCUCAUUAUCCCUGCCU | SEQ ID NO: 1527 | CCAGGGAUAAUGAGGGUCU | 0.280 |
| AH0241 | SEQ ID NO: 242 | CAGGGAUAAUGACCUAGUAGU | SEQ ID NO: 885 | UAGUAGCUCAUUAUCCCUGCC | SEQ ID NO: 1528 | CAGGGAUAAUGAGCUACUA | 0.143 |
| AH0242 | SEQ ID NO: 243 | AGGGAUAAUGAGCUACUAGUU | SEQ ID NO: 886 | CUAGUAGCUCAUUAUCCCUGC | SEQ ID NO: 1529 | AGGGAUAAUGAGCUACUAG | 0.325 |
| AH0243 | SEQ ID NO: 244 | GGGAUAAUGAGCUACUAGUUU | SEQ ID NO: 887 | ACUAGUAGCUCAUUAUCCCUG | SEQ ID NO: 1530 | GGGUAAAUGAGCUACUAGU | [symbol] |
| AH0244 | SEQ ID NO: 245 | GGAUAAUGAGCUACUAGUUUA | SEQ ID NO: 888 | AACUAGUAGCUGAUUAUCCCU | SEQ ID NO: 1531 | GGAUAAUGAGCUACUAGUU | 0.073 |
| AH0245 | SEQ ID NO: 246 | GAUAAUGAGGUACUAGUUUAU | SEQ ID NO: 889 | AAACUAGUAGCUCAUUAUCCC | SEQ ID NO: 1532 | GAUAAUGAGCUACUAGUUU | 0.085 |
| AH0246 | SEQ ID NO: 247 | AUAAUGAGCUACUAGUUUAUA | SEQ ID NO: 890 | UAAAGUAGUAGCUCAUUAUCC | SEQ ID NO: 1533 | AUAAUGAGCUACUAGUUUA | 0.115 |
| AH0247 | SEQ ID NO: 248 | UAAUGAGCUACUAGUUUAUAA | SEQ ID NO: 891 | AUAAACUAGUAGCUCAUUAUC | SEQ ID NO: 1534 | UAAUGAGCUACUAGUUUAU | 0.115 |
| AH0248 | SEQ ID NO: 249 | AUGAGCUACUAGUUUAUAAAG | SEQ ID NO: 892 | UUAUAAACUAGUAGCUCAUUA | SEQ ID NO: 1535 | AUGAGCUACUAGUUUAUAA | 0.195 |
| AH0249 | SEQ ID NO: 250 | UGAGCUACUAGUUUAUAAAGA | SEQ ID NO: 893 | UUUAUAAACUAGUAGCUCAUU | SEQ ID NO: 1536 | UGAGGUAGUAGUUUAUAAA | 0.124 |
| AH0250 | SEQ ID NO: 251 | GACCUACUAGUUUAUAAAGAA | SEQ ID NO: 894 | CUUUAUAAACUAGUAGCUCAU | SEQ ID NO: 1537 | GAGGUACUAGUUUAUAAAG | [symbol] |

[symbol]

indicates data missing or illegible when filed

TABLE 1-6

| Double-stranded | | Sense strand sequence | | Antisense strand | | Target APCS mRNA | Relative APCS |
|---|---|---|---|---|---|---|---|
| nucleic acid No. | SEQ ID NO: | (5′→3′) | SEQ ID NO: | sequence (5′→3′) | SEQ ID NO: | sequence | expression level |
| AH0251 | SEQ ID NO: 252 | AGCUACUAGUUUAUAAAGAAA | SEQ ID NO: 895 | UCUUUAUAAACUAGUAGCUCA | SEQ ID NO: 1538 | AGCUACUAGUUUAUAAAGA | 0.131 |
| AH0252 | SEQ ID NO: 253 | GCUACUAGUUUAUAAAGAAAG | SEQ ID NO: 896 | UUCUUUAUAAACUAGUAGCUC | SEQ ID NO: 1539 | GCUACUAGUUUAUAAAGAA | [symbol] |
| AH0253 | SEQ ID NO: 254 | CUACUAGUUUAUAAAGAAAGA | SEQ ID NO: 897 | UUUCUUUAUAAACUAGUAGCU | SEQ ID NO: 1540 | CUACUAGUUUAUAAAGAAA | [symbol] |
| AH0254 | SEQ ID NO: 255 | AGUUUAUAAAGAAAGAGUUGG | SEQ ID NO: 898 | AACUCUUUCUUUAUAAACUAG | SEQ ID NO: 1541 | AGUUUAUAAAGAAAGAGUU | 0.327 |
| AH0255 | SEQ ID NO: 256 | AAGAAAGAGUUGGAGAGUAUA | SEQ ID NO: 899 | UACUCUCCAACUCUUUCUUUA | SEQ ID NO: 1542 | AAGAAAGAGUUGGAGAGUA | 0.114 |
| AH0256 | SEQ ID NO: 257 | AGAAAGAGUUGGAGAGUAUAG | SEQ ID NO: 900 | AUACUCUCCAACUGUUUCUUU | SEQ ID NO: 1543 | AGAAAGAGUUGGAGAGUAU | 0.142 |
| AH0257 | SEQ ID NO: 258 | GAAAGAGUUGGAGAGUAUAGU | SEQ ID NO: 901 | UAUACUCUCCAACUCUUUCUU | SEQ ID NO: 1544 | GAAAGAGUUGGAGAGUAUA | [symbol] |
| AH0258 | SEQ ID NO: 259 | AAGAGUUCCAGAGUAUACUCU | SEQ ID NO: 902 | ACUAUACUCUCCAACUCUUUC | SEQ ID NO: 1545 | AAGAGUUGCAGAGUAUAGU | 0.282 |
| AH0259 | SEQ ID NO: 260 | AGAGUUGGAGAGUAUAGUCUA | SEQ ID NO: 903 | GACUAUACACUCCAACUCUUU | SEQ ID NO: 1546 | AGAGUUGGAGAGUAUAGUC | 0.178 |
| AH0260 | SEQ ID NO: 261 | GAGUUGGAGAGUAUAGUCUAU | SEQ ID NO: 904 | AGACUAUACUCUCCAACUCUU | SEQ ID NO: 1547 | GAGUUGGAGAGUAUAGUCU | 0.088 |
| AH0261 | SEQ ID NO: 262 | AGUUGGAGAGUAUAGUCUAUA | SEQ ID NO: 905 | UAGACUAUACUCUCCAACUCU | SEQ ID NO: 1548 | AGUUGGAGAGUAUAGUCUA | 0.034 |
| AH0262 | SEQ ID NO: 263 | GUUGGAGAGUAUAGUCUAUAC | SEQ ID NO: 906 | AUAGACUAUACUCUGGAACUC | SEQ ID NO: 1549 | GUUGGAGAGUAUAGUCUAU | [symbol] |
| AH0263 | SEQ ID NO: 264 | UUGGAGAGUAUAGUCUAUACA | SEQ ID NO: 907 | UAUAGACUAUACUCUCCAACU | SEQ ID NO: 1550 | UUGGAGAGUAUAGUCUAUA | [symbol] |
| AH0264 | SEQ ID NO: 265 | UGGAGAGUAUAGUCUAUACAU | SEQ ID NO: 908 | GUAUAGACUAUACUCUCCAAC | SEQ ID NO: 1551 | UGGAGAGUAUAGUCUAUAC | 0.357 |
| AH0265 | SEQ ID NO: 266 | GGAGAGUAUAGUCUAUAGAUU | SEQ ID NO: 909 | UGUAUAGACUAUAGUCUCCAA | SEQ ID NO: 1552 | GGAGAGUAUAGUCUAUACA | 0.133 |
| AH0266 | SEQ ID NO: 267 | GAGAGUAUAGUCUAUACAUUG | SEQ ID NO: 910 | AUCUAUAGACUAUACUCUCCA | SEQ ID NO: 1553 | GAGAGUAUAGUCUAUACAU | 0.430 |
| AH0267 | SEQ ID NO: 268 | AGAGUAUAGUGUAUACAUUGG | SEQ ID NO: 911 | AAUGUAUAGACUAUACUCUCC | SEQ ID NO: 1554 | AGAGUAUAGUCUAUACAUU | [symbol] |
| AH0268 | SEQ ID NO: 269 | GAGUAUAGUCUAUACAUUGGA | SEQ ID NO: 912 | CAAUGUAUAGACUAUACUCUC | SEQ ID NO: 1555 | GAGUAUAGUCUAUACAUUG | [symbol] |
| AH0269 | SEQ ID NO: 270 | AGUAUAGUCUAUACAUUGGAA | SEQ ID NO: 913 | CCAAUGUAUAGACUAUACUCU | SEQ ID NO: 1556 | AGUAUAGUCUAUACAUUGG | [symbol] |
| AH0270 | SEQ ID NO: 271 | GUAUAGUCUAUACAUUGGAAG | SEQ ID NO: 914 | UCCAAUGUAUAGACUAUACUC | SEQ ID NO: 1557 | GUAUAGUCUAUACAUUGGA | 0.145 |
| AH0271 | SEQ ID NO: 272 | GUCUAUACAUUGGAAGACACA | SEQ ID NO: 915 | UGUCUUCCAAUGUAUAGACUA | SEQ ID NO: 1558 | GUCUAUACAUUGGAAGACA | 0.249 |
| AH0272 | SEQ ID NO: 273 | CUAUACAUUGGAAGACACAAA | SEQ ID NO: 916 | UGUGUCUUCCAAUGUAUAGAC | SEQ ID NO: 1559 | CUAUACAUUGGAAGACACA | 0.165 |
| AH0273 | SEQ ID NO: 274 | UAUACAUUGGAAGACACAAAG | SEQ ID NO: 917 | UUGUGUCUUCCAAUGUAUAGA | SEQ ID NO: 1560 | UAUACAUUGGAAGACACAA | 0.312 |
| AH0274 | SEQ ID NO: 275 | AUACAUUGGAAGACACAAAGU | SEQ ID NO: 918 | UUUGUGUCUUCCAAUGUAUAG | SEQ ID NO: 1561 | AUACAUUGGAAGACACAAA | 0.298 |
| AH0275 | SEQ ID NO: 276 | ACAUUGGAAGACACAAAGUUA | SEQ ID NO: 919 | ACUUUGUGUCUUCCAAUGUAU | SEQ ID NO: 1562 | ACAUUGGAAGACACAAAGU | 0.382 |
| AH0276 | SEQ ID NO: 277 | CAUUGGAAGACACAAAGUUAC | SEQ ID NO: 920 | AACUUUGUGUCUUCCAAUGUA | SEQ ID NO: 1563 | CAUUGGAAGACACAAAGUU | [symbol] |
| AH0277 | SEQ ID NO: 278 | AUUGGAAGACACAAAGUUACA | SEQ ID NO: 921 | UAACUUUGUGUCUUCCAAUGU | SEQ ID NO: 1564 | AUUGGAAGACACAAAGUUA | 0.165 |
| AH0278 | SEQ ID NO: 279 | UGGAAGACACAAAGUUACAUC | SEQ ID NO: 922 | UGUAACUUUGUGUCUUCCAAU | SEQ ID NO: 1565 | UGGAAGACACAAAGUUACA | 0.257 |
| AH0279 | SEQ ID NO: 280 | GGAAGACACAAAGUUACAUCC | SEQ ID NO: 923 | AUGUAACUUUGUGUCUUCCAA | SEQ ID NO: 1566 | GGAAGACACAAAGUUACAU | 0.191 |
| AH0280 | SEQ ID NO: 281 | GAAGAGAGAAAGUUACAUCCA | SEQ ID NO: 924 | CAUGUAACUUUGUGUCUUGGA | SEQ ID NO: 1567 | GAAGACACAAAGUUACAUC | 0.353 |
| AH0281 | SEQ ID NO: 282 | AAGACACAAAGUUACAUCCAA | SEQ ID NO: 925 | GGAUGUAACUUUGUGUCUUCC | SEQ ID NO: 1568 | AAGACACAAAGUUACAUCC | [symbol] |
| AH0282 | SEQ ID NO: 283 | AGACACAAAGUUACAUCCAAA | SEQ ID NO: 926 | UGGAUCUAACUUUGUGUCUUC | SEQ ID NO: 1569 | AGACACAAAGUUACAUCCA | [symbol] |
| AH0283 | SEQ ID NO: 284 | GACACAAAGUUACAUCCAAAG | SEQ ID NO: 927 | UUGGAUGUAACUUUGUGUCUU | SEQ ID NO: 1570 | GACACAAAGUUACAUCCAA | [symbol] |
| AH0284 | SEQ ID NO: 285 | ACACAAAGUUACAUCCAAAGU | SEQ ID NO: 928 | UUUGGAUGUAACUUUGUGUCU | SEQ ID NO: 1571 | ACACAAAGUUACAUCCAAA | 0.047 |
| AH0285 | SEQ ID NO: 286 | CACAAACUUAGAUCCAAAGUU | SEQ ID NO: 929 | CUUUGGAUGUAACUUUCUGUC | SEQ ID NO: 1572 | CACAAACUUACAGGGAAAG | [symbol] |
| AH0286 | SEQ ID NO: 287 | CAAAGUUACAUCCAAAGUUAU | SEQ ID NO: 930 | AACUUUGGAUGUAACUUUGUG | SEQ ID NO: 1573 | CAAAGUUACAUCCAAAGUU | [symbol] |
| AH0287 | SEQ ID NO: 288 | AAAGUUACAUCCAAAGUUAUC | SEQ ID NO: 931 | UAACUUUGGAUGUAACUUUGU | SEQ ID NO: 1574 | AAAGUUACAUCCAAAGUUA | [symbol] |
| AH0288 | SEQ ID NO: 289 | AAGUUACAUCCAAAGUUAUCG | SEQ ID NO: 932 | AUAACUUUGGAUGUAACUUUG | SEQ ID NO: 1575 | AAGUUACAUCCAAAGUUAU | 0.088 |
| AH0289 | SEQ ID NO: 290 | AGUUACAUCCAAAGUUAUCCA | SEQ ID NO: 933 | CAUAACUUUGGAUGUAACUUU | SEQ ID NO: 1576 | AGUUACAUCCAAAGUUAUC | 0.276 |
| AH0290 | SEQ ID NO: 291 | GUUACAUCCAAAGUUAUCGAA | SEQ ID NO: 934 | CGAUAACUUUGGAUGUAACUU | SEQ ID NO: 1577 | GUUACAUCCAAAGUUAUCG | 0.240 |
| AH0291 | SEQ ID NO: 292 | UUACAUCCAAAGUUAUCGAAA | SEQ ID NO: 935 | UCGAUAACUUUGGAUGUAACU | SEQ ID NO: 1578 | UUAGAUCCAAACUUAUCGA | 0.352 |
| AH0292 | SEQ ID NO: 293 | UACAUCCAAAGUUAUCGAAAA | SEQ ID NO: 936 | UUCGAUAACUUUGGAUGUAAC | SEQ ID NO: 1579 | UACAUCCAAAGUUAUCGAA | [symbol] |
| AH0293 | SEQ ID NO: 294 | ACAUCCAAAGUUAUCGAAAAG | SEQ ID NO: 937 | UUUCGAUAACUUUGGAUGUAA | SEQ ID NO: 1580 | ACAUCCAAAGUUAUCGAAA | 0.288 |
| AH0294 | SEQ ID NO: 295 | CAUCCAAAGUUAUCGAAAAGU | SEQ ID NO: 938 | UUUUCGAUAACUUUGGAUGUA | SEQ ID NO: 1581 | CAUCCAAAGUUAUCGAAAA | 0.052 |
| AH0295 | SEQ ID NO: 296 | AUCCAAAGUUAUGGAAAAGUU | SEQ ID NO: 939 | CUUUUCGAUAACUUUGGAUGU | SEQ ID NO: 1582 | AUCCAAAGUUAUGGAAAAG | 0.245 |
| AH0296 | SEQ ID NO: 297 | UCCAAAGUUAUCGAAAAGUUC | SEQ ID NO: 940 | ACUUUUCGAUAACUUUGGAUG | SEQ ID NO: 1583 | UCCAAAGUUAUCGAAAAGU | [symbol] |
| AH0297 | SEQ ID NO: 298 | CCAAAGUUAUCGAAAAGUUCC | SEQ ID NO: 941 | AACUUUUCGAUAACUUUGGAU | SEQ ID NO: 1584 | CCAAAGUUAUCCAAAAGUU | [symbol] |
| AH0298 | SEQ ID NO: 299 | CAAAGUUAUCGAAAAGUUCCC | SEQ ID NO: 942 | GAACUUUUCGAUAACUUUGGA | SEQ ID NO: 1585 | CAAAGUUAUCGAAAAGUUC | 0.032 |
| AH0299 | SEQ ID NO: 300 | CGAAAAGUUCCCGGCUCCAGU | SEQ ID NO: 943 | UGGAGCCGGGAACUUUUGGAU | SEQ ID NO: 1586 | GGAAAACUUCCCGGCUCCA | 0.328 |
| AH0300 | SEQ ID NO: 301 | AAAAGUUCCCGGCUCCAGUGC | SEQ ID NO: 944 | ACUGGAGCCGGGAACUUUUCG | SEQ ID NO: 1587 | AAAAGUUCCCGGCUCCAGU | [symbol] |

[symbol]

indicates data missing or illegible when filed

TABLE 1-7

| Double-stranded | | Sense strand sequence | | Antisense strand | | Target APCS mRNA | Relative APCS |
|---|---|---|---|---|---|---|---|
| nucleic acid No. | SEQ ID NO: | (5′→3′) | SEQ ID NO: | sequence (5′→3′) | SEQ ID NO: | sequence | expression level |
| AH0301 | SEQ ID NO: 302 | CCCGGCUCCAGUGCACAUCUG | SEQ ID NO: 945 | GAUGUGCACUGGAGCCGGGAA | SEQ ID NO: 1588 | CCCGGCUCCAGUGCACAUC | [symbol] |
| AH0302 | SEQ ID NO: 303 | CGGCUCCAGUGCACAUCUGUG | SEQ ID NO: 946 | CAGAUGUGCACUGGAGCCGGG | SEQ ID NO: 1589 | CGGCUCCAGUCGACAUCUG | [symbol] |
| AH0303 | SEQ ID NO: 304 | GGCUCCAGUGCACAUCUGUGU | SEQ ID NO: 947 | ACAGAUGUGCACUGGAGCCGG | SEQ ID NO: 1590 | GGCUCCAGUGCACAUCUGU | 0.273 |
| AH0304 | SEQ ID NO: 305 | CCUCCAGUGCACAUCUGUGUG | SEQ ID NO: 948 | CACAGAUGUCCACUGGAGCCG | SEQ ID NO: 1591 | GCUCCAGUGCACAUGUGUG | 0.075 |
| AH0305 | SEQ ID NO: 306 | CUCCAGUGCACAUCUGUGUGA | SEQ ID NO: 949 | ACACAGAUGUGCACUGGAGCC | SEQ ID NO: 1592 | CUCCAGUGCACAUCUGUGU | 0.800 |
| AH0306 | SEQ ID NO: 307 | CCAGUGCACAUCUGUGUGAGC | SEQ ID NO: 950 | UCACACAGAUGUGCACUGGAG | SEQ ID NO: 1593 | CCAGUGCACAUCUGUCUGA | [symbol] |
| AH0307 | SEQ ID NO: 308 | GUGCACAUCUGUGUGAGCUGG | SEQ ID NO: 951 | AGCUCACAGAGAUGUGCACUG | SEQ ID NO: 1594 | CUGGAGAUCUGUGUGAGCU | [symbol] |
| AH0308 | SEQ ID NO: 309 | GCACAUCUGUGUGAGCUGGGA | SEQ ID NO: 952 | CCAGCUCACACAGAUGUGCAC | SEQ ID NO: 1595 | GCACAUCUGUGUGAGCUGG | 0.377 |
| AH0309 | SEQ ID NO: 310 | ACAUCUGUGUGAGCUGGGAGU | SEQ ID NO: 953 | UCCCAGCUGAGACAGAUGUGC | SEQ ID NO: 1596 | ACAGCUGUCUGAGGUGGGA | [symbol] |
| AH0310 | SEQ ID NO: 311 | AUCUGUGUGAGCUGGGAGUCC | SEQ ID NO: 954 | ACUCCCAGCUCACACAGAUGU | SEQ ID NO: 1597 | AUCUGUGUGAGCUGGGAGU | 0.317 |
| AH0311 | SEQ ID NO: 312 | UGUGUGAGCUGGGAGUCCUCA | SEQ ID NO: 955 | AGGACUGGGAGCUCACACAGA | SEQ ID NO: 1598 | UGUGUGAGCUGGGAGUGCU | 0.334 |
| AH0312 | SEQ ID NO: 313 | GUGUGAGCUGGGAGUCCUCAU | SEQ ID NO: 956 | GAGGACUCCCAGCUCACACAG | SEQ ID NO: 1599 | GUGUGAGCUGGGAGUCCUC | [symbol] |
| AH0313 | SEQ ID NO: 314 | AGCUGGGAGUCCUCAUCAGGU | SEQ ID NO: 957 | CUGAUGAGGACUCCCAGCUCA | SEQ ID NO: 1600 | AGCUGGGAGUCCUCAUCAG | [symbol] |
| AH0314 | SEQ ID NO: 315 | CCUGGGAGUCCUCAUCAGGUA | SEQ ID NO: 958 | CCUGAUGAGGACUCCCAGCUC | SEQ ID NO: 1601 | GCUGCGAGUCGUCAUCAGG | 0.223 |
| AH0315 | SEQ ID NO: 316 | CUGGGAGUCCUCAUCAGGUAU | SEQ ID NO: 959 | ACCUGAUGAGGACUCCCAGCU | SEQ ID NO: 1602 | CUGGGAGUCCUGAUCAGGU | 0.033 |
| AH0316 | SEQ ID NO: 317 | UGGGAGUCCUCAUGAGGUAUU | SEQ ID NO: 960 | UACCUGAUGAGGAGUCCCAGC | SEQ ID NO: 1603 | UGGGAGUCCUCAUCAGGUA | 0.082 |
| AH0317 | SEQ ID NO: 318 | GGGAGUCCUCAUCAGGUAUUG | SEQ ID NO: 961 | AUACCUGAUGAGGACUCCCAG | SEQ ID NO: 1604 | GGGAGUCCUCAUCAGGUAU | 0.218 |
| AH0318 | SEQ ID NO: 319 | GGAGUCCGCAUCAGGUAUUCC | SEQ ID NO: 962 | AAUACCUGAUGAGGACUCCCA | SEQ ID NO: 1605 | GGAGUCCUGAUGAGGUAUU | 0.117 |
| AH0319 | SEQ ID NO: 320 | GAGUCCUGAUGAGGUAUUGCU | SEQ ID NO: 963 | CAAUACCUGAUGAGGACUCCC | SEQ ID NO: 1606 | GAGUCCUCAUCAGGUAUUG | 0.271 |
| AH0320 | SEQ ID NO: 321 | GUCCUCAUCAGGUAUUGCUGA | SEQ ID NO: 964 | ACCAAUACCUGAUGAGGACUC | SEQ ID NO: 1607 | GUCCUCAUGAGGUAUUGCU | 0.076 |
| AH0321 | SEQ ID NO: 322 | UCCUCAUCAGGUAUUGCUGAA | SEQ ID NO: 965 | CAGCAAUACCUGAUGAGGACU | SEQ ID NO: 1608 | UCCUCAUCAGGUAUUGCUG | [symbol] |
| AH0322 | SEQ ID NO: 323 | CCUCAUCAGGUAUUGCUGAAU | SEQ ID NO: 966 | UCAGCAAUACCUGAUGAGGAC | SEQ ID NO: 1609 | CCUCAUCAGGUAUUGCUGA | [symbol] |
| AH0323 | SEQ ID NO: 324 | CUCAUCAGGGAUUGCUGAAUU | SEQ ID NO: 967 | UUCAGCAAUACCUGAUGAGGA | SEQ ID NO: 1610 | CUCAUCACCUAUUGGUGAA | [symbol] |
| AH0324 | SEQ ID NO: 325 | UCAUCAGGUAUUGCUGAAUUU | SEQ ID NO: 968 | AUUCAGCAAUACCUGAUGAGG | SEQ ID NO: 1611 | UCAUCAGGUAUUGCUGAAU | 0.246 |
| AH0325 | SEQ ID NO: 326 | CAUCAGGUAUUCCUGAAUUUG | SEQ ID NO: 969 | AAUUCAGCAAUACCUGAUGAG | SEQ ID NO: 1612 | CAUCAGGUAUUGCUGAAUU | 0.137 |
| AH0326 | SEQ ID NO: 327 | AUCAGGUAUUGCUGAAUUUUG | SEQ ID NO: 970 | AAAUUCAGCAAUACCUGAUGA | SEQ ID NO: 1613 | AUCAGGUAUUGCUGAAUUU | [symbol] |
| AH0327 | SEQ ID NO: 328 | UCAGGUAUUGCUGAAUUUUGG | SEQ ID NO: 971 | AAAAUUCAGCAAUACCUGAUG | SEQ ID NO: 1614 | UCAGGUAUUGCUGAAUUUU | 0.243 |
| AH0328 | SEQ ID NO: 329 | CAGGUAUUGGUGAAUUUUGGA | SEQ ID NO: 972 | CAAAAUUCAGCAAUAGCUGAU | SEQ ID NO: 1615 | CAGGUAUUCCUGAAUUUUG | 0.240 |
| AH0329 | SEQ ID NO: 330 | AGGUAUUGCUGAAUUUUGGAU | SEQ ID NO: 973 | CCAAAAUUCAGCAAUACCUGA | SEQ ID NO: 1616 | AGGUAUUGCUGAAUUUUGG | 0.089 |
| AH0330 | SEQ ID NO: 331 | GGUAUUGCUGAAUUUUGGAUC | SEQ ID NO: 974 | UCCAAAAUUCAGCAAUACCUG | SEQ ID NO: 1617 | GGUAUUGCUGAAUUUUGGA | 0.075 |
| AH0331 | SEQ ID NO: 332 | GUAUUGCUGAAUUUUGGAUGA | SEQ ID NO: 975 | AUCCAAAAUUCAGCAAUACCU | SEQ ID NO: 1618 | GUAUUGCUGAAUUUUGGAU | [symbol] |
| AH0332 | SEQ ID NO: 333 | AUUGGUGAAUUUUGGAUCAAU | SEQ ID NO: 976 | UGAUCCAAAAUUCAGCAAUAC | SEQ ID NO: 1619 | AUUGCUCAAUUUUGGAUCA | 0.178 |
| AH0333 | SEQ ID NO: 334 | UGCUGAAUUUUGGAUCAAUGG | SEQ ID NO: 977 | AUUGAUCCAAAAUUCAGCAAU | SEQ ID NO: 1620 | UGCUGAAUUUUGGAUCAAU | 0.220 |
| AH0334 | SEQ ID NO: 335 | GCUGAAUUUUGGAUCAAUGGG | SEQ ID NO: 978 | CAUUGAUCCAAAAUUCAGCAA | SEQ ID NO: 1621 | CCUGAAUUUUGGAUCAAUG | [symbol] |
| AH0335 | SEQ ID NO: 336 | CUGAAUUUUGCAUCAAUGGGA | SEQ ID NO: 979 | CCAUUGAUCCAAAAUUCAGCA | SEQ ID NO: 1622 | CUGAAUUUUGGAUCAAUGG | 0.311 |
| AH0336 | SEQ ID NO: 337 | GAAUUUUGGAUCAAUGGGACA | SEQ ID NO: 980 | UCCCAUUGAUCCAAAAUUCAG | SEQ ID NO: 1623 | GAAUUUUGGAUCAAUGGGA | [symbol] |
| AH0337 | SEQ ID NO: 338 | GGAUGAAUGGGACAGGUUUGG | SEQ ID NO: 981 | AAAGGUGUCCCAUUGAUCCAA | SEQ ID NO: 1624 | GGAUCAAUGGGACACCUUU | 0.129 |
| AH0338 | SEQ ID NO: 339 | CAAUGGGACACCUUUGGUGAA | SEQ ID NO: 982 | CACCAAAGGUGUCCCAUUGAU | SEQ ID NO: 1625 | CAAUGGGACACCUUUGGUG | 0.365 |
| AH0339 | SEQ ID NO: 340 | AAUGGGACACCUUUGGUGAAA | SEQ ID NO: 983 | UCACCAAAGGUGUCCCAUUGA | SEQ ID NO: 1626 | AAUGGGACACCUUUGGUGA | [symbol] |
| AH0340 | SEQ ID NO: 341 | AUGGGACACCUUUGGUGAAAA | SEQ ID NO: 984 | UUCACCAAAGGUGUCCCAUUG | SEQ ID NO: 1627 | AUGGGAGAGGUUUGGUGAA | 0.338 |
| AH0341 | SEQ ID NO: 342 | UGGGACACCUUUGGUGAAAAA | SEQ ID NO: 985 | UUUCACCAAAGGUGUCCCAUU | SEQ ID NO: 1628 | UGGCACACCUUUGGUGAAA | 0.328 |
| AH0342 | SEQ ID NO: 343 | GGGACACCUUUGGUGAAAAAG | SEQ ID NO: 986 | UUUUCACCAAAGGUCUCCGAU | SEQ ID NO: 1629 | GGGACACCUUUGGUGAAAA | 0.122 |
| AH0343 | SEQ ID NO: 344 | GGACACCUUUGGUGAAAAAGG | SEQ ID NO: 987 | UUUUUCACCAAAGGUGUCCCA | SEQ ID NO: 1630 | GGACACCUUUGGUGAAAAA | [symbol] |
| AH0344 | SEQ ID NO: 345 | ACCUUUGGUGAAAAAGGGUCU | SEQ ID NO: 988 | ACCCUUUUUCACCAAAGGUGU | SEQ ID NO: 1631 | ACCUUUGGUGAAAAAGGGU | 0.122 |
| AH0345 | SEQ ID NO: 346 | CCUUUGGUGAAAAAGGGUCUG | SEQ ID NO: 989 | GACCCUUUUUCACCAAAGGUG | SEQ ID NO: 1632 | CCUUUGGUGAAAAAGGGUC | [symbol] |
| AH0346 | SEQ ID NO: 347 | CUUUGGUGAAAAAGGGUCUCC | SEQ ID NO: 990 | AGACCCUUUUUCACCAAAGGU | SEQ ID NO: 1633 | CUUUGGUGAAAAAGGGUCU | 0.440 |
| AH0347 | SEQ ID NO: 348 | GGUGAAAAAGGCUCUGCGACA | SEQ ID NO: 991 | UCGCAGACCCUUUUUCACCAA | SEQ ID NO: 1634 | GGUGAAAAAGGGUCUGCGA | 0.082 |
| AH0348 | SEQ ID NO: 349 | GUGAAAAAGGGUCUGCGACAG | SEQ ID NO: 992 | GUCGCAGACCCUUUUUCACCA | SEQ ID NO: 1635 | GUGAAAAAGGGUCUGCGAC | 0.270 |
| AH0349 | SEQ ID NO: 350 | UGAAAAAGGGGGUGCGACAGG | SEQ ID NO: 993 | UGUUCAGACCCUUUUUGAGG | SEQ ID NO: 1636 | UGAAAAAGGGUCUGCGACA | [symbol] |
| AH0350 | SEQ ID NO: 351 | GAAAAAGGGUCUGCGACAGGG | SEQ ID NO: 994 | CUGUCGCAGACCCUUUUUCAC | SEQ ID NO: 1637 | GAAAAAGGGUCUGCGACAG | 0.378 |

[symbol]

indicates data missing or illegible when filed

TABLE 1-8

| Double-stranded | | Sense strand sequence | | Antisense strand | | Target APCS mRNA | Relative APCS |
|---|---|---|---|---|---|---|---|
| nucleic acid No. | SEQ ID NO: | (5′→3′) | SEQ ID NO: | sequence (5′→3′) | SEQ ID NO: | sequence | expression level |
| AH0351 | SEQ ID NO: 352 | AAAGGGUCUGCGACAGGGUUA | SEQ ID NO: 995 | ACCCUGUCGCAGACCCUUUUU | SEQ ID NO: 1638 | AAAGGGUGUGCGACAGGGU | [symbol] |
| AH0352 | SEQ ID NO: 353 | AAGGGUCUGCGACAGGGUUAC | SEQ ID NO: 996 | AACCCUGUCGCAGACCCUUUU | SEQ ID NO: 1639 | AAGGGUCUGCGACAGGGUU | 0.182 |
| AH0353 | SEQ ID NO: 354 | AGCCUCUGCGACAGGGUUACU | SEQ ID NO: 997 | UAACCCUCUCGCAGACCCUUU | SEQ ID NO: 1640 | AGGCUCUGCGACAGGGUUA | [symbol] |
| AH0354 | SEQ ID NO: 355 | GGGUCUGCGACAGGGUUACUU | SEQ ID NO: 998 | GUAACCCUGUCGCAGACGCUU | SEQ ID NO: 1641 | GGGUCUGCGACAGGGUUAC | [symbol] |
| AH0355 | SEQ ID NO: 356 | GGUCUGCGACAGGGUUACUUU | SEQ ID NO: 999 | AGUAACCCUGUCGCAGACCCU | SEQ ID NO: 1642 | GGUCUGCGACAGGGUUACU | [symbol] |
| AH0356 | SEQ ID NO: 357 | GUCUGCGACAGGGUUACUUUG | SEQ ID NO: 1000 | AAGUAACCCUGUGGCAGACCC | SEQ ID NO: 1643 | CUGCGACAGGGUUACUUUG | [symbol] |
| AH0357 | SEQ ID NO: 358 | UCUGCGACAGGGUUACUUUGU | SEQ ID NO: 1001 | AAAGUAACCCUGUCGCAGACC | SEQ ID NO: 1644 | UGCGACAGGGUUACUUUGU | 0.126 |
| AH0358 | SEQ ID NO: 359 | CUGCGACAGGGUUACUUUGUA | SEQ ID NO: 1002 | CAAAGUAACCCUGUCGCAGAC | SEQ ID NO: 1645 | CUGCGACAGGGUUACUUUG | 0.120 |
| AH0359 | SEQ ID NO: 360 | UGCGACAGGGUUACUUUGUAG | SEQ ID NO: 1003 | ACAAAGUAACCCUGUCGCAGA | SEQ ID NO: 1646 | UGCGACAGGGUUACUUUGU | 0.438 |
| AH0360 | SEQ ID NO: 361 | GCGACAGGGUUACUUUGUAGA | SEQ ID NO: 1004 | UACAAAGUAACCCUGUCGCAG | SEQ ID NO: 1647 | GCGACAGGGUUACUUUGUA | [symbol] |
| AH0361 | SEQ ID NO: 362 | CGACAGGGUUACUUUGUAGAA | SEQ ID NO: 1005 | CUACAAAGUAACCCUGUCGCA | SEQ ID NO: 1648 | CGACAGGGUUACUUUGUAG | [symbol] |
| AH0362 | SEQ ID NO: 363 | GACAGGGUUACUUUGUAGAAG | SEQ ID NO: 1006 | UCUACAAAGUAACCCUGUCGC | SEQ ID NO: 1649 | GACAGGGUUACUUUGUAGA | [symbol] |
| AH0363 | SEQ ID NO: 364 | ACAGGGUUACUUUGUAGAAGC | SEQ ID NO: 1007 | UUCUACAAAGUAACCCUGUCG | SEQ ID NO: 1650 | ACAGGCUUACUUUGUAGAA | [symbol] |
| AH0364 | SEQ ID NO: 365 | CAGGGUUACUUUGUAGAAGCU | SEQ ID NO: 1008 | CUUCUACAAAGUAACCCUGUC | SEQ ID NO: 1651 | CAGGGUUACUUUGUAGAAG | 0.158 |
| AH0365 | SEQ ID NO: 366 | AGGGUUACUUUGUAGAAGCUC | SEQ ID NO: 1009 | GCUUCUACAAAGUAACCCUGU | SEQ ID NO: 1652 | AGGGUUACUUUGUAGAAGG | [symbol] |
| AH0366 | SEQ ID NO: 367 | GGGUUACUUUCUAGAAGGUCA | SEQ ID NO: 1010 | AGCUUCUACAAAGUAACGCUG | SEQ ID NO: 1653 | GGGUUACUUUGUAGAAGCU | 0.179 |
| AH0367 | SEQ ID NO: 368 | GGUUACUUUGUAGAAGCUCAG | SEQ ID NO: 1011 | GAGCUUCUACAAAGUAACCCU | SEQ ID NO: 1654 | GGUUACUUUGUAGAAGCUC | 0.222 |
| AH0368 | SEQ ID NO: 369 | CUUACUUUGUAGAAGCUCAGC | SEQ ID NO: 1012 | UGAGCUUCUACAAACUAACCC | SEQ ID NO: 1655 | GUUACUUUGUAGAAGCUCA | [symbol] |
| AH0369 | SEQ ID NO: 370 | AGAAGCUCAGCCCAAGAUUGU | SEQ ID NO: 1013 | AAUCUUGGGCUGAGCUUCUAC | SEQ ID NO: 1656 | AGAAGCUCAGCCCAAGAUU | 0.313 |
| AH0370 | SEQ ID NO: 371 | GAAGCUCAGCCCAAGAUUGUC | SEQ ID NO: 1014 | CAAUCUUGGGCUGACCUUCUA | SEQ ID NO: 1657 | GAAGGUCAGCCCAAGAUUG | [symbol] |
| AH0371 | SEQ ID NO: 372 | AAGCUCAGCCCAAGAUUGUCC | SEQ ID NO: 1015 | ACAAUCUUGGGCUGAGCUUCU | SEQ ID NO: 1658 | AAGCUCAGCCCAAGAUUGU | 0.082 |
| AH0372 | SEQ ID NO: 373 | AGCUCAGCCCAAGAUUGUCCU | SEQ ID NO: 1016 | GACAAUCUUGGGCUGAGCUUC | SEQ ID NO: 1659 | AGCUCAGCCCAAGAUUGUC | 0.142 |
| AH0373 | SEQ ID NO: 374 | CUCAGCCCAAGAGUGUCCUGG | SEQ ID NO: 1017 | AGGACAAUCUUGGGCUGAGCU | SEQ ID NO: 1660 | CUCAGCCCAAGAUUGUCCU | [symbol] |
| AH0374 | SEQ ID NO: 375 | AGCCCAAGAUUGUCCUGGGGC | SEQ ID NO: 1018 | CCCAGGACAAUCUUGGGCUGA | SEQ ID NO: 1661 | AGCCCAAGAUUGUCCUGGG | [symbol] |
| AH0375 | SEQ ID NO: 376 | CCAAGAUUGUCCUGGGGCAGG | SEQ ID NO: 1019 | UGGCCCAGGACAAUCUUGGGC | SEQ ID NO: 1662 | CCAAGAUUGUCCUCGGGCA | [symbol] |
| AH0376 | SEQ ID NO: 377 | CAAGAUUGUCCUGGGGCAGGA | SEQ ID NO: 1020 | CUGCCCCAGGACAAUCUUGGG | SEQ ID NO: 1663 | CAAGAUUGUCCUGGGGCAG | [symbol] |
| AH0377 | SEQ ID NO: 378 | AGAUUCUCCUGGGCCAGGAAC | SEQ ID NO: 1021 | UCCUGGGGCAGGAGAAUCUUG | SEQ ID NO: 1664 | AGAUUGUCCUGGGGCAGGA | [symbol] |
| AH0378 | SEQ ID NO: 379 | GAUUGUCCUGGGGCAGGAACA | SEQ ID NO: 1022 | UUCCUGCCCCAGGACAAUCUU | SEQ ID NO: 1665 | GAUUGUCCUGGGGCAGGAA | [symbol] |
| AH0379 | SEQ ID NO: 380 | UUGUCCUGGGGCAGGAACAGG | SEQ ID NO: 1023 | UGUUCCUGCCCGAGGACAAUG | SEQ ID NO: 1666 | UUGUCCUGGGGCAGGAACA | 0.432 |
| AH0380 | SEQ ID NO: 381 | UCCUGGGGCAGGAACAGGAUU | SEQ ID NO: 1024 | UCGUGUUCCUGCCCCAGGACA | SEQ ID NO: 1667 | UCCUGGCCCAGGAACAGGA | 0.170 |
| AH0381 | SEQ ID NO: 382 | CUGGGGCAGGAACAGGAUUCC | SEQ ID NO: 1025 | AAUCCUGUUCCUGCCCCAGGA | SEQ ID NO: 1668 | CUGGGGCAGGAACAGGAUU | [symbol] |
| AH0382 | SEQ ID NO: 383 | UGGGGCAGGAACAGGAUUCCU | SEQ ID NO: 1026 | GAAUCCUGUUCCUGCCCCAGG | SEQ ID NO: 1669 | UGGGGCAGGAACAGGAUUC | 0.484 |
| AH0383 | SEQ ID NO: 384 | GGGGCAGGAACAGGAUUCCUA | SEQ ID NO: 1027 | GGAAUCCUGUUCCUGCCCCAG | SEQ ID NO: 1670 | GGGGCAGGAACAGGAUUCC | [symbol] |
| AH0384 | SEQ ID NO: 385 | GGCAGGAACAGGAUUCCUAUG | SEQ ID NO: 1028 | UAGGAAUCCUGUUCCUGCCCC | SEQ ID NO: 1671 | GGCAGGAACAGGAUUCCUA | 0.074 |
| AH0385 | SEQ ID NO: 386 | GCAGGAACAGGAUUCCUAUGG | SEQ ID NO: 1029 | AUAGGAAUCCUGUUCCUGCCC | SEQ ID NO: 1672 | GCAGGAACAGGAUUCCUAU | 0.148 |
| AH0386 | SEQ ID NO: 387 | CAGGAACAGGAUUCCUAUGGG | SEQ ID NO: 1030 | CAUAGGAAUCCUGUUCCUGCC | SEQ ID NO: 1673 | CAGGAACAGGAUUCCUAUG | [symbol] |
| AH0387 | SEQ ID NO: 388 | GGAACAGGAUUCCUAUGGGGG | SEQ ID NO: 1031 | CCCAUAGGAAUCCUGUUCCUG | SEQ ID NO: 1674 | GCAACAGGAUUCCUAUGGG | [symbol] |
| AH0388 | SEQ ID NO: 389 | GAACAGGAUUCCUAUGGGGGC | SEQ ID NO: 1032 | CCCCAUAGGAAUCCUGUUCCU | SEQ ID NO: 1675 | GAACAGGAUUCCUAUGGGG | 0.437 |
| AH0389 | SEQ ID NO: 390 | ACAGGAUUCCUAUGGGGGCAA | SEQ ID NO: 1033 | GCCCCCAUAGGAAUCCUGUUG | SEQ ID NO: 1676 | ACAGGAUUCCUAUGGGGGC | 0.349 |
| AH0390 | SEQ ID NO: 391 | CAGGAUUCCUAUGGGGGCAAG | SEQ ID NO: 1034 | UGCCCCCAUAGGAAUCCUGUU | SEQ ID NO: 1677 | CAGGAUUCCUAUGGGGGCA | 0.279 |
| AH0391 | SEQ ID NO: 392 | GGAUUCCUAUGGGGGCAAGUU | SEQ ID NO: 1035 | CUUGCCCCCAUAGGAAUCCUG | SEQ ID NO: 1678 | GGAUUCCUAUGGGGGCAAG | [symbol] |
| AH0392 | SEQ ID NO: 393 | GAUUCCUAUGGGGGCAAGUUU | SEQ ID NO: 1036 | ACUUGCCCCCAUAGGAAUCCU | SEQ ID NO: 1679 | GAUUCCUAUGGGGGCAAGU | [symbol] |
| AH0393 | SEQ ID NO: 394 | AUUCCUAUGGGGGCAAGUUUG | SEQ ID NO: 1037 | AACUUGCCCCCAUAGGAAUCC | SEQ ID NO: 1680 | AUUCCUAUGGCGGGAAGUU | 0.373 |
| AH0394 | SEQ ID NO: 395 | UUCCUAUGGGGGCAAGUUUGA | SEQ ID NO: 1038 | AAACUUGCCCCCAUAGGAAUC | SEQ ID NO: 1681 | UUCCUAUGGGGGCAAGUUU | 0.481 |
| AH0395 | SEQ ID NO: 396 | UCCUAUGGGGGCAAGUUUGAU | SEQ ID NO: 1039 | CAAACUUGCCCCCAUAGGAAU | SEQ ID NO: 1682 | UCCUAUGGGGGCAAGUUUG | 0.385 |
| AH0396 | SEQ ID NO: 397 | CCUAUGGGGGCAAGUUUGAUA | SEQ ID NO: 1040 | UCAAACUUGCCCCCAUAGGAA | SEQ ID NO: 1683 | CCUAUGGGGGCAAGUUUGA | 0.272 |
| AH0397 | SEQ ID NO: 398 | CUAUGGGGGCAAGUUUGAUAG | SEQ ID NO: 1041 | AUCAAAGUUGCCCCCAUAGGA | SEQ ID NO: 1684 | CUAUGGGGGCAAGUUUGAU | 0.198 |
| AH0398 | SEQ ID NO: 399 | UAUGGGGGCAAGUUUGAUAGG | SEQ ID NO: 1042 | UAUCAAACUUGCCCCCAUAGG | SEQ ID NO: 1685 | UAUGGGGGCAAGUUUGAUA | [symbol] |
| AH0399 | SEQ ID NO: 400 | GGGGGCCCGUUUGAUAGGAGC | SEQ ID NO: 1043 | UCCUAUCAAAGUUGCCCCCAU | SEQ ID NO: 1686 | GGGGGCAAGUUUGAUAGGA | [symbol] |
| AH0400 | SEQ ID NO: 401 | GGGGGAAGUUUGAUAGGAGCC | SEQ ID NO: 1044 | CUCCUAUCAAACUUGCCCCCA | SEQ ID NO: 1687 | GGGGCAAGUUUGAUAGGAG | 0.100 |

[symbol]

indicates data missing or illegible when filed

TABLE 1-9

| Double-stranded | | Sense strand sequence | | Antisense strand | | Target APCS mRNA | Relative APCS |
|---|---|---|---|---|---|---|---|
| nucleic acid No. | SEQ ID NO: | (5′→3′) | SEQ ID NO: | sequence (5′→3′) | SEQ ID NO: | sequence | expression level |
| AH0401 | SEQ ID NO: 402 | GGCCAAGUUUGAUAGGAGCCA | SEQ ID NO: 1045 | GCUCCUAUCAAACUUGCCCCC | SEQ ID NO: 1688 | GGGCAAGUUUGAUAGGAGC | 0.114 |
| AH0402 | SEQ ID NO: 403 | GGCAAGUUUGAUAGGAGCCAG | SEQ ID NO: 1046 | GGCUCUUAUCAAACUUGCCCC | SEQ ID NO: 1689 | GGGAAGUUUGAUAGGAGCC | 0.314 |
| AH0403 | SEQ ID NO: 404 | GCAAGUUUGAUAGGAGCCAGU | SEQ ID NO: 1047 | UGGCUCCUAUCAAACUUGCCC | SEQ ID NO: 1690 | GCAAGUUUGAUAGGAGCCA | 0.235 |
| AH0404 | SEQ ID NO: 405 | CAAGUUUGAUAGGAGCCAGUC | SEQ ID NO: 1048 | CUGGCUCCUAUCAAACUUGCC | SEQ ID NO: 1691 | CAAGUUUGAUAGGAGCCAG | 0.274 |
| AH0405 | SEQ ID NO: 406 | AAGUUUGAUAGGAGCCAGUCC | SEQ ID NO: 1049 | ACUGGCUCCUAUCAAACUUGC | SEQ ID NO: 1692 | AAGUUUGAUAGGAGCCAGU | 0.085 |
| AH0406 | SEQ ID NO: 407 | UUGAUAGGAGCCAGUCCUUUG | SEQ ID NO: 1050 | AAGGACUGGCUCCUAUCAAAC | SEQ ID NO: 1693 | UUGAUAGGAGCCAGUCCUU | 0.242 |
| AH0407 | SEQ ID NO: 408 | UGAUAGGAGCCAGUCCUUUGU | SEQ ID NO: 1051 | AAAGGACUGGCUCCUAUCAAA | SEQ ID NO: 1694 | UGAUAGGAGCCAGUCCUUU | 0.239 |
| AH0408 | SEQ ID NO: 409 | GAUAGGAGCCAGUCCUUUGGG | SEQ ID NO: 1052 | CAAAGGACUGGCUCCUAUCAA | SEQ ID NO: 1695 | GAUAGGAGCCAGUCCUUUG | 0.160 |
| AH0409 | SEQ ID NO: 410 | AUAGGAGCCAGUCCUUUGUGG | SEQ ID NO: 1053 | ACAAAGGACUGGCUCCUAUCA | SEQ ID NO: 1696 | AUAGGAGCCAGUCCUUUGU | 0.159 |
| AH0410 | SEQ ID NO: 411 | AGGAGCCAGUCCUUUGUGGGA | SEQ ID NO: 1054 | CCACAAAGGACUGGCUCCUAU | SEQ ID NO: 1697 | AGGAGCCAGUCCUUUGUGG | 0.313 |
| AH0411 | SEQ ID NO: 412 | GGAGCCAGUCCUUUGUGGGAG | SEQ ID NO: 1055 | CCCACAAAGGACUGGCUCCUA | SEQ ID NO: 1698 | GGAGCCAGUCCUUUGUGGG | 0.232 |
| AH0412 | SEQ ID NO: 413 | GAGCCAGUCCUUUGUGGGAGA | SEQ ID NO: 1056 | UCCCACAAAGGACUGGCUCCU | SEQ ID NO: 1699 | GAGCCAGUCCUUUGUGGGA | [symbol] |
| AH0413 | SEQ ID NO: 414 | AGCCAGUCCUUUGUGGGAGAG | SEQ ID NO: 1057 | CUCCCACAAAGGACUGGCUCC | SEQ ID NO: 1700 | AGCCAGUCCUUUGUGGGAG | 0.325 |
| AH0414 | SEQ ID NO: 415 | GCCAGUCCUUUGUGGGAGAGA | SEQ ID NO: 1058 | UCUCCCACAAAGGACUGGGUC | SEQ ID NO: 1701 | GCCAGUCCUUUGUGGGAGA | 0.109 |
| AH0415 | SEQ ID NO: 416 | CCAGUCCUUUGUGGGAGAGAU | SEQ ID NO: 1059 | CUCUCCCACAAAGGACUGGGU | SEQ ID NO: 1702 | CCAGUCCUUUGUGGGAGAG | [symbol] |
| AH0416 | SEQ ID NO: 417 | CAGUCCUUUGUGGGAGAGAUU | SEQ ID NO: 1060 | UGUGUCCCACAAAGGACUGGC | SEQ ID NO: 1703 | CAGUCCUUUGUGGGAGAGA | 0.119 |
| AH0417 | SEQ ID NO: 418 | AGUCCUUUGUGGGAGAGAUUG | SEQ ID NO: 1061 | AUCUCUCCCACAAAGGACUGG | SEQ ID NO: 1704 | AGUCCUUUGUGGGAGAGAU | 0.074 |
| AH0418 | SEQ ID NO: 419 | GUCCUUUGUGGGAGAGAUUGG | SEQ ID NO: 1062 | AAUCUCUCCCACAAAGGACUG | SEQ ID NO: 1705 | GUCCUUUGUGGGAGAGAUU | 0.095 |
| AH0419 | SEQ ID NO: 420 | UCCUUUGUGGGAGAGAUUGGG | SEQ ID NO: 1063 | CAAUCUCUCCCACAAAGGACU | SEQ ID NO: 1706 | UCCUUUGUGGGAGAGAUUG | [symbol] |
| AH0420 | SEQ ID NO: 421 | CCUUUGUGGGAGAGAUUGGGG | SEQ ID NO: 1064 | CCAAUCUCCCCCACAAAGGAC | SEQ ID NO: 1707 | CCUUUGUGGGAGAGAUUGG | [symbol] |
| AH0421 | SEQ ID NO: 422 | CUUUGUGGGAGAGAUUGGGGA | SEQ ID NO: 1065 | CCCAAUCUCUCCCACAAAGGA | SEQ ID NO: 1708 | CUUUGUGGGAGAGAUUGGG | [symbol] |
| AH0422 | SEQ ID NO: 423 | UUGUGGGAGAGAUUGGGGAUU | SEQ ID NO: 1066 | UCCCCAAUCUCUCCCACAAAG | SEQ ID NO: 1709 | UUGUGGGAGAGAUUGGGGA | 0.214 |
| AH0423 | SEQ ID NO: 424 | UGUGGGAGAGAUUGGGGAUUU | SEQ ID NO: 1067 | AUCCCCAAUCUCUCCCACAAA | SEQ ID NO: 1710 | UGUGGGAGAGAUUGGGGAU | [symbol] |
| AH0424 | SEQ ID NO: 425 | GUGGGAGAGAUUGGGGAUUUG | SEQ ID NO: 1068 | AAUCCCCAAUCUCUCCCACAA | SEQ ID NO: 1711 | GUGGGAGAGAUUGGGGAUU | 0.098 |
| AH0425 | SEQ ID NO: 426 | UGGGAGAGAUUGGGGAUUUGU | SEQ ID NO: 1069 | AAAUCCCCAAUCUCUCCCACA | SEQ ID NO: 1712 | UGGGAGAGAUUGGGGAUUU | 0.103 |
| AH0426 | SEQ ID NO: 427 | GGGAGAGAUUGGGGAUCUGUA | SEQ ID NO: 1070 | CAAAUCCCCAAUCUCUCCCAC | SEQ ID NO: 1713 | GGGAGAGAUUGGGGAUUUG | [symbol] |
| AH0427 | SEQ ID NO: 428 | GGAGAGAUUGGGGAUUUGUAC | SEQ ID NO: 1071 | ACAAAUCCCCAAUCUCUCCGA | SEQ ID NO: 1714 | GGAGAGAUUGGGGAUUUGU | 0.071 |
| AH0428 | SEQ ID NO: 429 | GAGAGAUUGGGGAUUUGUACA | SEQ ID NO: 1072 | UACAAAUCCCCAAUCUCUCCG | SEQ ID NO: 1715 | GAGAGAUUGGGGAUUUGUA | [symbol] |
| AH0429 | SEQ ID NO: 430 | AGAGAUUGGGGAUUUGUACAU | SEQ ID NO: 1073 | GUAGAAAUCCCCAAUCUCUCC | SEQ ID NO: 1716 | AGAGAUUGGGGAUUUGUAC | 0.175 |
| AH0430 | SEQ ID NO: 431 | GAGAUUGGGGAUUUGUACAUG | SEQ ID NO: 1074 | UGUACAAAUCCCCAAUCUCUC | SEQ ID NO: 1717 | GAGAUUGGGGAUUUGUACA | 0.079 |
| AH0431 | SEQ ID NO: 432 | AGAUUGGGGAUUUGUACAUGU | SEQ ID NO: 1075 | AUGUACAAAUCCCCAAUCUCU | SEQ ID NO: 1718 | AGAUUGGGGAUUUGUACAU | [symbol] |
| AH0432 | SEQ ID NO: 433 | GGGGAUUUGUACAUGUGGGAC | SEQ ID NO: 1076 | CCCACAUGUACAAAUCCCCAA | SEQ ID NO: 1719 | GGGGAUUUGUACAUGUGGG | 0.154 |
| AH0433 | SEQ ID NO: 434 | GGGAUUUGUACAUGUGGGACU | SEQ ID NO: 1077 | UCCCACAUGUACAAAUCCCCA | SEQ ID NO: 1720 | GGGAUUUGUACAUGUGGGA | [symbol] |
| AH0434 | SEQ ID NO: 435 | GGAUUUGUACAUGUGGGACUC | SEQ ID NO: 1078 | GUCCCACAUGUACAAAUCCCC | SEQ ID NO: 1721 | GGAUUUGUACAUGUGGGAC | 0.324 |
| AH0435 | SEQ ID NO: 436 | GAUUUGUACAUGUGGGACUCU | SEQ ID NO: 1079 | AGUCCCACAUGUACAAAUCCC | SEQ ID NO: 1722 | GAUUUGUACAUGUGGGACU | 0.308 |
| AH0436 | SEQ ID NO: 437 | UGUACAUGUGGGACUCUGUGC | SEQ ID NO: 1080 | ACAGAGUCCCACAUGUACAAA | SEQ ID NO: 1723 | UGUACAUGUGGGACUCUGU | 0.210 |
| AH0437 | SEQ ID NO: 438 | GUACAUGUGGGACUCUGUGCU | SEQ ID NO: 1081 | CACAGAGUCCCACAUGUACAA | SEQ ID NO: 1724 | GUACAUGUGGGACUCUGUG | 0.384 |
| AH0438 | SEQ ID NO: 439 | AGAUGUGGGACUCUGUCCUGC | SEQ ID NO: 1082 | AGCACAGAGUCCCAGAUGUAC | SEQ ID NO: 1725 | ACAUGUGGGACUCUGUGCU | 0.268 |
| AH0439 | SEQ ID NO: 440 | GGGACUCUGUGCUGCCCCCAG | SEQ ID NO: 1083 | GGGGGCAGCACAGAGUCCGAC | SEQ ID NO: 1726 | GGGACUCUGUGCUGCCCCC | 0.483 |
| AH0440 | SEQ ID NO: 441 | GGACUCUGUGCUGCCCCCAGA | SEQ ID NO: 1084 | UGGGGGCAGCACAGAGUCCCA | SEQ ID NO: 1727 | GGACUCUGUGCUGCCCCCA | 0.500 |
| AH0441 | SEQ ID NO: 442 | ACUCUGUGCUGCCCCCAGAAA | SEQ ID NO: 1085 | UCUGGGGGCAGCACAGAGUCC | SEQ ID NO: 1728 | ACUCUGUGUUGCCCCCAGA | [symbol] |
| AH0442 | SEQ ID NO: 443 | CUCUGUGCUGCCCCCAGAAAA | SEQ ID NO: 1086 | UUCUGGGGGCAGCACAGAGUC | SEQ ID NO: 1729 | CUCUGUGGUGCCCCCAGAA | 0.459 |
| AH0443 | SEQ ID NO: 444 | CUGUGCUGCCCCCAGAAAAUA | SEQ ID NO: 1087 | UUUUCUGGGGGCAGCACAGAG | SEQ ID NO: 1730 | CUGUGCUGCCCCCAGAAAA | 0.134 |
| AH0444 | SEQ ID NO: 445 | UGUGCUGCCCCCAGAAAAUAU | SEQ ID NO: 1088 | AUUUUCUGGGGGCAGGAGAGA | SEQ ID NO: 1731 | UGUGCUGCCCCCAGAAAAU | 0.083 |
| AH0445 | SEQ ID NO: 446 | GUGCUGCCCCCAGAAAAUAUG | SEQ ID NO: 1089 | UAUUUUCUGGGGGCAGGAGAG | SEQ ID NO: 1732 | CUGCUGCCCCCAGAAAAUA | 0.433 |
| AH0446 | SEQ ID NO: 447 | GGUGCCCCCAGAAAAUAUCCU | SEQ ID NO: 1090 | GAUAUUUUCUGGGGGCAGCAC | SEQ ID NO: 1733 | GCUGCCCCCAGAAAAUAUC | 0.414 |
| AH0447 | SEQ ID NO: 448 | CCCCCAGAAAAUAUCCUGUCU | SEQ ID NO: 1091 | ACAGGAUAUUUUCUGGGGGCA | SEQ ID NO: 1734 | CCCCCAGAAAAUAUCCUGU | 0.189 |
| AH0448 | SEQ ID NO: 449 | CCCAGAAAAUAUCCUGUCUGC | SEQ ID NO: 1092 | AGAGAGGAUAUUUUCUGGGGG | SEQ ID NO: 1735 | CCCAGAAAAUAUCCUGUCU | 0.489 |
| AH0449 | SEQ ID NO: 450 | CCAGAAAAUAUCCUGUCUGCC | SEQ ID NO: 1093 | CAGAGAGGAUAUUUUCUGGGG | SEQ ID NO: 1736 | CCAGAAAAUAUCCUGUCUG | 0.353 |
| AH0450 | SEQ ID NO: 451 | CAGAAAAUAUCCUGUCUGCCU | SEQ ID NO: 1094 | GCAGACAGGAUAUUUUCUGGG | SEQ ID NO: 1737 | CAGAAAAUAUCCUGUCUGC | [symbol] |

[symbol]

indicates data missing or illegible when filed

TABLE 1-10

| Double-stranded | | Sense strand sequence | | Antisense strand | | Target APCS mRNA | Relative APCS |
|---|---|---|---|---|---|---|---|
| nucleic acid No. | SEQ ID NO: | (5′→3′) | SEQ ID NO: | sequence (5′→3′) | SEQ ID NO: | sequence | expression level |
| AH0451 | SEQ ID NO: 452 | GAAAAUAUCCUGUCUGCCUAU | SEQ ID NO: 1095 | AGGCAGACAGGAUAUUUUCUG | SEQ ID NO: 1738 | GAAAAUAUCCUGUCUGCCU | 0.121 |
| AH0452 | SEQ ID NO: 453 | AAAAUAUCCUGUCUGCCUAUC | SEQ ID NO: 1096 | UAGGCAGACAGGAUAUUUUCU | SEQ ID NO: 1739 | AAAAUAUGGUGUCUGGGUA | 0.053 |
| AH0453 | SEQ ID NO: 454 | AAAUAUCCUGUCUGCCUAUCA | SEQ ID NO: 1097 | AUAGGCAGACAGGAUAUUUUC | SEQ ID NO: 1740 | AAAUAUCCUGUCUGGGUAU | 0.108 |
| AH0454 | SEQ ID NO: 455 | CCUGUCUGGGUAUCAGGGUAC | SEQ ID NO: 1098 | ACCCUGAUAGGCAGACAGGAU | SEQ ID NO: 1741 | CCUGUCUGGGUAUCAGGGU | 0.298 |
| AH0455 | SEQ ID NO: 456 | CUGUCUGCCUAUCAGGGUACC | SEQ ID NO: 1099 | UACCCUGAUAGGCAGACAGGA | SEQ ID NO: 1742 | CUGUCUGCCUAUCAGGGUA | 0.113 |
| AH0456 | SEQ ID NO: 457 | GUCUGCCUAUCAGGGUACCCC | SEQ ID NO: 1100 | GGUACCCUGAUAGGCAGACAG | SEQ ID NO: 1743 | GUCUGCCUAUCAGGCUACC | 0.336 |
| AH0457 | SEQ ID NO: 458 | UGCCUAUCAGGGUACCCCUCU | SEQ ID NO: 1101 | AGGGGUACCCUGAUAGGCAGA | SEQ ID NO: 1744 | UGCCUAUCAGGGUACCCCU | 0.251 |
| AH0458 | SEQ ID NO: 459 | GCCUAUCAGGGUACCCCUCUC | SEQ ID NO: 1102 | GAGGGGUACCCUGAUAGGGAG | SEQ ID NO: 1745 | GCCUAUCAGGGUACCCCUC | 0.218 |
| AH0459 | SEQ ID NO: 460 | CCUAUCAGGGUACCCCUCUCC | SEQ ID NO: 1103 | AGAGGGGUACCCUGAUAGGCA | SEQ ID NO: 1746 | CCUAUCAGGGUACCCCUCU | 0.403 |
| AH0460 | SEQ ID NO: 461 | CUAUCAGGGUACCCCUCUCCC | SEQ ID NO: 1104 | GAGAGGGGUACCCUGAUAGGG | SEQ ID NO: 1747 | CUAUGAGGGGACCCCUCUC | 0.104 |
| AH0461 | SEQ ID NO: 462 | CAGGGUACCCCUCUCCCUGCC | SEQ ID NO: 1105 | CAGGGAGAGGGGUACCCUGAU | SEQ ID NO: 1748 | CAGGGUACCCCUCUCCCUG | 0.300 |
| AH0462 | SEQ ID NO: 463 | GGGUACCCCUCUCCCUGCCAA | SEQ ID NO: 1106 | GGCAGGGAGAGGGGUACCCUG | SEQ ID NO: 1749 | GGGUACCCCUCUCCCUGCC | 0.463 |
| AH0463 | SEQ ID NO: 464 | GGUACCCCUCUCCCUGCCAAU | SEQ ID NO: 1107 | UGGCAGGGAGAGGGGUACCCU | SEQ ID NO: 1750 | GGUACCCCUCUCCCUGCCA | 0.476 |
| AH0464 | SEQ ID NO: 465 | GUACCCCUCUCCCUGCCAAUA | SEQ ID NO: 1108 | UUGGCAGGGAGAGGGGUACCC | SEQ ID NO: 1751 | UACCCCUCUCCCUCCCAAU | 0.159 |
| AH0465 | SEQ ID NO: 466 | UACCCCUCUCCCUGCCAAUAU | SEQ ID NO: 1109 | AUUGGCAGGGAGAGGGGUACC | SEQ ID NO: 1752 | CCCCUCUCCCUGCCAAUAU | 0.381 |
| AH0466 | SEQ ID NO: 467 | CCCCUCUCCCUGGGAAUAUGC | SEQ ID NO: 1110 | AUAUUGGCAGCGAGAGGGGUA | SEQ ID NO: 1753 | CCCCUCUCCCUGCCAAUAU | 0.339 |
| AH0467 | SEQ ID NO: 468 | CCCUCUCCCUGCCAAUAUCCU | SEQ ID NO: 1111 | GAUAUUGGCAGGGAGAGGGGU | SEQ ID NO: 1754 | CCCCUCUCCCUGCCAAUAU | 0.208 |
| AH0468 | SEQ ID NO: 469 | CUGCCAAUAUCCUGGACUGGC | SEQ ID NO: 1112 | CAGUCCAGGAUAUUGGCAGGG | SEQ ID NO: 1755 | CCCUCUCCCUGCCAAUAUC | 0.333 |
| AH0469 | SEQ ID NO: 470 | CCAAUAUCCUGGACUGGCAGG | SEQ ID NO: 1113 | UGGGAGUCCAGGAUAUUGGCA | SEQ ID NO: 1756 | CUGCCAAUAUCCUGGACUG | 0.120 |
| AH0470 | SEQ ID NO: 471 | CAAUAUCCUGGACUGGCAGGC | SEQ ID NO: 1114 | CUGCCAGUCCAGGAUAUUGGC | SEQ ID NO: 1757 | CCAAUAUGGUGGACUGGGA | 0.289 |
| AH0471 | SEQ ID NO: 472 | UCCUGGACUGGCACCCUGUGA | SEQ ID NO: 1115 | AGAGCCUGCCAGUCCAGGAUA | SEQ ID NO: 1758 | CAAUAUCCUGGACUGGCAG | [symbol] |
| AH0472 | SEQ ID NO: 473 | CCUGGACUGGCAGGCUCUGAA | SEQ ID NO: 1116 | CAGAGCCUGCCAGUCCAGGAU | SEQ ID NO: 1759 | CCCUGGACUGGCAGGCUCC | 0.463 |
| AH0473 | SEQ ID NO: 474 | CUGGACUCCCAGGCUCUGAAC | SEQ ID NO: 1117 | UCAGAGCCUGCCAGUCCAGGA | SEQ ID NO: 1760 | CUGGACUGGCAGGCUCUGA | 0.454 |
| AH0474 | SEQ ID NO: 475 | UGGACUGGCAGGCUCUGAACU | SEQ ID NO: 1118 | UUCAGAGGGUGCCAGUCCAGG | SEQ ID NO: 1761 | UGGACUGGCAGGCUCUGAA | 0.850 |
| AH0475 | SEQ ID NO: 476 | GGACUGGCAGGCUCUGAACUA | SEQ ID NO: 1119 | GUUCAGAGCCUGCCAGUCCAG | SEQ ID NO: 1762 | GGACUGGCAGGCUCUGAAC | [symbol] |
| AH0476 | SEQ ID NO: 477 | GACUGGGAGGCUCUGAACUAU | SEQ ID NO: 1120 | AGUUCAGAGCCUGCGAGUCCA | SEQ ID NO: 1763 | GACUCCCAGGGUCUGAACU | 0.308 |
| AH0477 | SEQ ID NO: 478 | ACUGGCAGGCUCUGAACUAUG | SEQ ID NO: 1121 | UAGUUCAGAUCCUGCCAGUCC | SEQ ID NO: 1764 | ACUGGCAGGCUCUGAACUA | [symbol] |
| AH0478 | SEQ ID NO: 479 | CUGGCAGGCUGGGAACUAUGA | SEQ ID NO: 1122 | AUAGUUCAGAGCCUGCCAGUC | SEQ ID NO: 1765 | CUGGCAGGCUCUGAACUAU | [symbol] |
| AH0479 | SEQ ID NO: 480 | UGGCAGGCUCUGAACUAUGAA | SEQ ID NO: 1123 | GAUAGUUCAGAGCCUGCCAGU | SEQ ID NO: 1766 | UGGCAGGCUCUGAACUAUG | [symbol] |
| AH0480 | SEQ ID NO: 481 | GCCAGGCUCUGAACUAUGAAA | SEQ ID NO: 1124 | UCAUAGUUCAGAGCCUGCCAG | SEQ ID NO: 1767 | GGCAGGCUCUGAACUAUGA | 0.077 |
| AH0481 | SEQ ID NO: 482 | GCAGGCUCUGAACUAUGAAAU | SEQ ID NO: 1125 | UUCAUAGUUCAGAGCCUGCCA | SEQ ID NO: 1768 | GCAGGCUCUGAACUAUGAA | 0.406 |
| AH0482 | SEQ ID NO: 483 | CAGGCUGUGAACUAUGAAAUC | SEQ ID NO: 1126 | UUUCAUAGUUCAGAGCCUGCC | SEQ ID NO: 1769 | CAGGCUCUGAACUAUGAAA | 0.133 |
| AH0483 | SEQ ID NO: 484 | AGGCUCUGAACUAUGAAAUCA | SEQ ID NO: 1127 | AUUUCAUAGUUCAGAGCCUGC | SEQ ID NO: 1770 | AGGCUCUGAACUAUGAAAU | [symbol] |
| AH0484 | SEQ ID NO: 485 | GGCUCUGAACUAUGAAAUCAG | SEQ ID NO: 1128 | GAUUUCAUAGUUCAGAUCCUG | SEQ ID NO: 1771 | GGGUCUGAACUAUGAAAUC | 0.085 |
| AH0485 | SEQ ID NO: 486 | GCUCUGAACUAUGAAAUCAGA | SEQ ID NO: 1129 | UGAUUUCAUAGUUCAGAGCCU | SEQ ID NO: 1772 | GCUCUGAACGAUGAAAUCA | 0.217 |
| AH0486 | SEQ ID NO: 487 | CUCUGAACUAUGAAAUGAGAG | SEQ ID NO: 1130 | CUGAUUUCAUAGUUCAGAGCC | SEQ ID NO: 1773 | CUCUGAACUAUGAAAUCAG | [symbol] |
| AH0487 | SEQ ID NO: 488 | UCUGAACUAUGAAAUCAGAGG | SEQ ID NO: 1131 | UCUGAUUUCAUAGUUCAGAGC | SEQ ID NO: 1774 | UCUGAACUAUGAAAUCAGA | [symbol] |
| AH0488 | SEQ ID NO: 489 | GAACUAUGAAAUCAGAGGAUA | SEQ ID NO: 1132 | UCCUCUGAUUUCAUAGUUCAG | SEQ ID NO: 1775 | GAACUAUGAAAUCAGAGGA | 0.129 |
| AH0489 | SEQ ID NO: 490 | AACUAUGAAAUCAGAGGAUAU | SEQ ID NO: 1133 | AUCCCCUGAUUUCAUAGUUCA | SEQ ID NO: 1776 | AACUAUGAAAUCAGAGGAU | [symbol] |
| AH0490 | SEQ ID NO: 491 | ACUAUGAAAUCAGAGGAUAUG | SEQ ID NO: 1134 | UAUCCUCUGAUUUCAUAGUUC | SEQ ID NO: 1777 | ACUAUGAAAUCAGAGGAUA | [symbol] |
| AH0491 | SEQ ID NO: 492 | CUAUGAAAUCAGAGGAUAUGU | SEQ ID NO: 1135 | AUAUCCUCUGAUUUCAUAGUU | SEQ ID NO: 1778 | CUAUGAAAUCAGAGGAUAU | 0.104 |
| AH0492 | SEQ ID NO: 493 | UAUGAAAUGAGAGGAUAUGUC | SEQ ID NO: 1136 | CAUAUCCUCUGAUUUCAUAGU | SEQ ID NO: 1779 | UAUGAAAUGAGAGGAUAUG | 0.330 |
| AH0493 | SEQ ID NO: 494 | UGAAAUCAGAGGAUAUGUCAU | SEQ ID NO: 1137 | GACAUAUCCUCUGAUUUCAUA | SEQ ID NO: 1780 | UGAAAUCAGAGGAUAUGUC | 0.338 |
| AH0494 | SEQ ID NO: 495 | GAAAUCAGAGGAUAUGUCAUC | SEQ ID NO: 1138 | UGACAUAUCCUCUGAUUUCAU | SEQ ID NO: 1781 | GAAAUCAGAGGAUAUGUCA | 0.043 |
| AH0495 | SEQ ID NO: 496 | AAAUCAGAGGAUAUCUCAUGA | SEQ ID NO: 1139 | AUGACAUAUCCUCUGAUUUCA | SEQ ID NO: 1782 | AAAUCAGAGGAUAUGUCAU | 0.084 |
| AH0496 | SEQ ID NO: 497 | AAUCAGAGGAUAUGUCAUCAU | SEQ ID NO: 1140 | GAUGACAUAUCCUCUGAUUUC | SEQ ID NO: 1783 | AAUCAGAGGAUAUGUCAUC | 0.488 |
| AH0497 | SEQ ID NO: 498 | CAGAGGAUAUGUCAUCAUCAA | SEQ ID NO: 1141 | GAUGAUGAGAUAUGGUCUGAU | SEQ ID NO: 1784 | CAGAGGAUAUGUCAUCAUC | 0.142 |
| AH0498 | SEQ ID NO: 499 | AGAGGAUAUGUCAUCAUCAAA | SEQ ID NO: 1142 | UGAUGAUGACAUAUCCUCUGA | SEQ ID NO: 1785 | AGAGGAUAUGUCAUCAUCA | [symbol] |
| AH0499 | SEQ ID NO: 500 | GAGGAUAUGUCAUCAUCAAAG | SEQ ID NO: 1143 | UUGAUGAUGACAUAUCCUCUG | SEQ ID NO: 1786 | GAGGAUAUGUCAUCAUCAA | 0.079 |
| AH0500 | SEQ ID NO: 501 | AGGAUAUGUCAUGAUGAAACC | SEQ ID NO: 1144 | UUUGAUGAUGACAUAUCCUCU | SEQ ID NO: 1787 | AGGAGAUGUCAUCAUCAAA | [symbol] |

[symbol]

indicates data missing or illegible when filed

TABLE 1-11

| Double-stranded | | Sense strand sequence | | Antisense strand | | Target APCS mRNA | Relative APCS |
|---|---|---|---|---|---|---|---|
| nucleic acid No. | SEQ ID NO: | (5′→3′) | SEQ ID NO: | sequence (5′→3′) | SEQ ID NO: | sequence | expression level |
| AH0501 | SEQ ID NO: 502 | GGAUAUGUCAUCAUCAAACCC | SEQ ID NO: 1145 | GUUUGAUGAUGACAUAUCCUC | SEQ ID NO: 1788 | GGAUAUGUCAUCAUCAAAC | [symbol] |
| AH0502 | SEQ ID NO: 503 | GAUAUGUCAUCAUCAAACCCU | SEQ ID NO: 1146 | GGUUUGAUGAUGACAUAUCCU | SEQ ID NO: 1789 | GAUAUGUCAUCAUGAAACC | 0.343 |
| AH0503 | SEQ ID NO: 504 | AUGUCAUCAUCAAACCCUUGG | SEQ ID NO: 1147 | AAGGGUUUGAUGAUGACAUAU | SEQ ID NO: 1790 | AUGUCAUCAUCAAACCCUU | 0.173 |
| AH0504 | SEQ ID NO: 505 | CAUCAUCAAACCCUUGGUGUG | SEQ ID NO: 1148 | CACCAAGGGUUUGAUGAUGAC | SEQ ID NO: 1791 | CAUCAUCAAACCCUUGGUG | 0.442 |
| AH0505 | SEQ ID NO: 506 | UCAUCAAACCCUUGGUGUGGG | SEQ ID NO: 1149 | CACACCAAGGGUUUGAUGAUG | SEQ ID NO: 1792 | UCAUCAAACCCUUGGUGUG | 0.353 |
| AH0506 | SEQ ID NO: 507 | ACCCUUGGUGUGGGUCUGAGG | SEQ ID NO: 1150 | UCAGACCCAGACGAAGGGUUU | SEQ ID NO: 1793 | ACCCUUGGUGUGGGUCUGA | 0.393 |
| AH0507 | SEQ ID NO: 508 | CCCUUGGUGUGGGUCUGAGGU | SEQ ID NO: 1151 | CUCAGACCCACACCAAGGGUU | SEQ ID NO: 1794 | CCCUUGGUGUGGGUCUGAG | 0.273 |
| AH0508 | SEQ ID NO: 509 | CCUUGGUGUGGGUCUGAGGUC | SEQ ID NO: 1152 | CCUCAGACCCACACCAAGGGU | SEQ ID NO: 1795 | CCUUGGUGUGGGUCUGAGG | 0.137 |
| AH0509 | SEQ ID NO: 510 | CUUGGUGUGGGUCUGAGGUCU | SEQ ID NO: 1153 | ACCUGAGACCCACACCAAGGG | SEQ ID NO: 1796 | CCUUGGUGUGGGUCUGAGG | 0.220 |
| AH0510 | SEQ ID NO: 511 | UGGUGUGGGUCUGAGGUCUUG | SEQ ID NO: 1154 | AGACCUCAGACCCACACCAAG | SEQ ID NO: 1797 | CUUGGUGUGGGUCUGAGGU | [symbol] |
| AH0511 | SEQ ID NO: 512 | GGUGUGGGUCUGAGGUCUUGA | SEQ ID NO: 1155 | AAGACCUCAGACCCACACCAA | SEQ ID NO: 1798 | UGGUGUGGGUCUGAGGUCU | [symbol] |
| AH0512 | SEQ ID NO: 513 | GUGUGGGUCUGAGGUCUUGAC | SEQ ID NO: 1156 | CAAGACCUCAGACCCACACCA | SEQ ID NO: 1799 | GUGUGGGUCUGAGGUCUUG | [symbol] |
| AH0513 | SEQ ID NO: 514 | UGUGGGUGUGAGGUCUUGACU | SEQ ID NO: 1157 | UCAAGAGCUCAGACCCACACC | SEQ ID NO: 1800 | UGUGGCUCUGAGGUCUUGA | 0.098 |
| AH0514 | SEQ ID NO: 515 | GUGGGUCUGAGGUCUUGACUG | SEQ ID NO: 1158 | GUCAAGAGGUCAGACCCACAC | SEQ ID NO: 1801 | GUGGGUCUGAGGUGUUGAC | [symbol] |
| AH0515 | SEQ ID NO: 516 | GGGUCUGAGGUCUUGACUGAA | SEQ ID NO: 1159 | GAGUCAAGACCUCAGACCCAC | SEQ ID NO: 1802 | GGGUCUGAGGUCUUGACUG | 0.072 |
| AH0516 | SEQ ID NO: 517 | GGUCUGAGGUCUUGAGUCAAC | SEQ ID NO: 1160 | UCAGUCAAGACCUCAGAGGGA | SEQ ID NO: 1803 | GGUCUGAGGUCUUGACUCA | 0.146 |
| AH0517 | SEQ ID NO: 518 | GUCUGAGGUCUUGACUCAACG | SEQ ID NO: 1161 | UUGAGUCAAGACCUCAGACCC | SEQ ID NO: 1804 | GUCUGAGGUCUUGACUCAA | 0.241 |
| AH0518 | SEQ ID NO: 519 | CUCAGGUCUUGACUCAACGAG | SEQ ID NO: 1162 | CGUUGAGUCAAGACCUCAGAC | SEQ ID NO: 1805 | CUGAGGUCUUGACUGAACG | 0.087 |
| AH0519 | SEQ ID NO: 520 | UGAGGUCUUGACUCAACGAGA | SEQ ID NO: 1163 | UCGUUGAGUCAAGAGGUCAGA | SEQ ID NO: 1806 | UGAGGUCUUGACUCAACGA | [symbol] |
| AH0520 | SEQ ID NO: 521 | GAGGUCUUGACUCAACCAGAG | SEQ ID NO: 1164 | CUCCUUGAGUCAAGACCUCAG | SEQ ID NO: 1807 | GAGGUCUUGACUCAACGAG | [symbol] |
| AH0521 | SEQ ID NO: 522 | AGGUGUUGACUCAACGAGAGC | SEQ ID NO: 1165 | UCUCGUUGAGUCAAGACCUCA | SEQ ID NO: 1808 | AGGUCUUGACUCAACGAGA | [symbol] |
| AH0522 | SEQ ID NO: 523 | GGUCUUGACUCAACGAGAGCA | SEQ ID NO: 1166 | CUCUCGUUGAGUCAAGACCUC | SEQ ID NO: 1809 | GGUCUUGACUCAACGAGAG | [symbol] |
| AH0523 | SEQ ID NO: 524 | GUCUUGACUGAAGGAGAGCAC | SEQ ID NO: 1167 | GCUCUCGUUGAGUCAAGACCU | SEQ ID NO: 1810 | GUCUUGACUCAACGAGAGC | [symbol] |
| AH0524 | SEQ ID NO: 525 | GCUUGACUCAACGAGAGCACU | SEQ ID NO: 1168 | UGCUCUCGUUGAGUCAAGACC | SEQ ID NO: 1811 | UCUUGACUCAACGAGAGCA | [symbol] |
| AH0525 | SEQ ID NO: 526 | CUUGACUCAACGAGAGCACUU | SEQ ID NO: 1169 | GUGCUCUCGUUGAGUCAAGAC | SEQ ID NO: 1812 | CUUGACUCAACGAGAGCAC | [symbol] |
| AH0526 | SEQ ID NO: 527 | UUGACUCAACGAGAGCACUUG | SEQ ID NO: 1170 | AGUGCUCUCGUUGAGUCAAGA | SEQ ID NO: 1813 | UUGACUCAACGAGAGCACU | [symbol] |
| AH0527 | SEQ ID NO: 528 | UGACUCAACGAGAGCACUUGA | SEQ ID NO: 1171 | AACUGCUCUCGUUGAGUGAAG | SEQ ID NO: 1814 | UGACUCAACGAGAGCACUU | [symbol] |
| AH0528 | SEQ ID NO: 529 | GACUCAACGAGAGCACUUGAA | SEQ ID NO: 1172 | CAAGUGCUCUCGUUGAGUCAA | SEQ ID NO: 1815 | GACUCAACGAGAGCACUUG | [symbol] |
| AH0529 | SEQ ID NO: 530 | ACUCAACGAGAGCACUUGAAA | SEQ ID NO: 1173 | UCAAGUGCUCUCGUUGAGUCA | SEQ ID NO: 1816 | ACUCAACGAGAGCACUUGA | [symbol] |
| AH0530 | SEQ ID NO: 531 | CUCAACGAGAGCACUUGAAAA | SEQ ID NO: 1174 | UUCAAGUGCUCUCGUUGAGUC | SEQ ID NO: 1817 | CACAACGAGAGCACUUGAA | [symbol] |
| AH0531 | SEQ ID NO: 532 | UCAACGAGAGCACUUGAAAAU | SEQ ID NO: 1175 | UUUCAAGUGCUCUCGUUGAGU | SEQ ID NO: 1818 | UCAACGAGAGCACUUGAAA | 0.083 |
| AH0532 | SEQ ID NO: 533 | CAACGAGAGCACUUGAAAAUG | SEQ ID NO: 1176 | UUUUCAAGUGCUCUCGUUGAG | SEQ ID NO: 1819 | CAACGAGAGCACUUGAAAA | 0.086 |
| AH0533 | SEQ ID NO: 534 | AACGAGAGCACUUGAAAAUGA | SEQ ID NO: 1177 | AUUUUGAAGUGCUCUCCUUGA | SEQ ID NO: 1820 | AACGAGAGCACUUGAAAAU | 0.054 |
| AH0534 | SEQ ID NO: 535 | ACGAGAGCACUUGAAAAUGAA | SEQ ID NO: 1178 | CAUUUUCAAGUGCUCUCGUUG | SEQ ID NO: 1821 | ACGAGAGCACUUGAAAAUG | 0.073 |
| AH0535 | SEQ ID NO: 536 | CGAGAGCCACUUGAAAUGAAA | SEQ ID NO: 1179 | UCAUUUUCAAGUGGUCUCGUU | SEQ ID NO: 1822 | CGAGAGCACUUGAAAAUGA | 0.026 |
| AH0536 | SEQ ID NO: 537 | GAGAGCACUUGAAAAUGAAAU | SEQ ID NO: 1180 | UUCAUUUUCAAGUGCUCUCGU | SEQ ID NO: 1823 | GAGAGCACUUGAAAAUGAA | 0.031 |
| AH0537 | SEQ ID NO: 538 | AGAGCACUUGAAAAUGAAAUG | SEQ ID NO: 1181 | UUUCAUUUUCAAGUCCUCUCG | SEQ ID NO: 1824 | AGAGCACUUGAAAAUGAAA | [symbol] |
| AH0538 | SEQ ID NO: 539 | GAGCACUUGAAAAUGAAAUGA | SEQ ID NO: 1182 | AUUUCAUUUUCAAGUGCUCUC | SEQ ID NO: 1825 | GAGCACUUGAAAAUGAAAU | 0.054 |
| AH0539 | SEQ ID NO: 540 | AGCACUUGAAAAUGAAAUGAC | SEQ ID NO: 1183 | CAUUUCAUUUUCAAGUGCUCU | SEQ ID NO: 1826 | AGCACUUGAAAAUGAAAUG | 0.032 |
| AH0540 | SEQ ID NO: 541 | GCACUUGAAAAUGAAAUGAGU | SEQ ID NO: 1184 | UCAUUUCAUUUUCAAGUGCUC | SEQ ID NO: 1827 | GCACUUCAAAAUGAAAUGA | 0.074 |
| AH0541 | SEQ ID NO: 542 | CACUUGAAAAUCAAAUGACUG | SEQ ID NO: 1185 | GUCAUUUCAUUUUCAAGUGCU | SEQ ID NO: 1828 | CACUUGAAAAUGAAAUGAC | 0.204 |
| AH0542 | SEQ ID NO: 543 | ACUUGAAAAUGAAAUGACUGU | SEQ ID NO: 1186 | AGUCAUUUCAUUUUCAAGUGC | SEQ ID NO: 1829 | ACUUGAAAAUGAAAUGACU | [symbol] |
| AH0543 | SEQ ID NO: 544 | CUUGAAAAUGAAAUGACUGUC | SEQ ID NO: 1187 | CAGUCAUUUCAUUUUCAAGUG | SEQ ID NO: 1830 | CUUGAAAAUGAAAUGACUG | [symbol] |
| AH0544 | SEQ ID NO: 545 | UUGAAAAUGAAAUGACUGUCU | SEQ ID NO: 1188 | ACAGUCAUUUCAUUUUCAAGU | SEQ ID NO: 1831 | UUGAAAAUGAAAUGACUGU | 0.201 |
| AH0545 | SEQ ID NO: 546 | UGAAAAUGAAAUGACUGUCUA | SEQ ID NO: 1189 | GACAGUCAUUUCAUUUUCAAG | SEQ ID NO: 1832 | UGAAAAUGAAAUGACUGUC | 0.445 |
| AH0546 | SEQ ID NO: 547 | GAAAAUGAAAUGACUGUCCAA | SEQ ID NO: 1190 | AGACAGUGAUUUCAUUUUCAA | SEQ ID NO: 1833 | GAAAAUGAAAUGACUGUGU | [symbol] |
| AH0547 | SEQ ID NO: 548 | AAAAUGAAAUGACUGUGUAAG | SEQ ID NO: 1191 | UAGACAGUCAUUUCAUUUUCA | SEQ ID NO: 1834 | AAAAUGAAAUGACUGUCUA | [symbol] |
| AH0548 | SEQ ID NO: 549 | AAAUGAAAUGACUGUGUAAGA | SEQ ID NO: 1192 | UUAGACAGUGAUUUGAUUUUC | SEQ ID NO: 1835 | AAAUGAAAUGACUGUCUAA | 0.073 |
| AH0549 | SEQ ID NO: 550 | AAUGAAAUGACUGUCUAAGAG | SEQ ID NO: 1193 | CUUAGACAGUCAUUUCAUUUU | SEQ ID NO: 1836 | AAUGAAAUGACUGUCUAAG | [symbol] |
| AH0550 | SEQ ID NO: 551 | AUGAAAUGACUGUCUAACAGA | SEQ ID NO: 1194 | UCUUAGACAGUCAUUUCAUUU | SEQ ID NO: 1837 | AUGAAAUGACUGGCUAAGA | [symbol] |

[symbol]

indicates data missing or illegible when filed

TABLE 1-12

| Double-stranded | | Sense strand sequence | | Antisense strand | | Target APCS mRNA | Relative APCS |
|---|---|---|---|---|---|---|---|
| nucleic acid No. | SEQ ID NO: | (5′→3′) | SEQ ID NO: | sequence (5′→3′) | SEQ ID NO: | sequence | expression level |
| AH0551 | SEQ ID NO: 552 | UGAAAUGACUGUCUAAGAGAU | SEQ ID NO: 1195 | CUCUUAGACAGUCAUUUCAUU | SEQ ID NO: 1838 | UGAAAUGACUGUCUAAGAG | [symbol] |
| AH0552 | SEQ ID NO: 553 | GAAAUGAGUGUCUAAGAGAUC | SEQ ID NO: 1196 | UCUCUUAGACAGUCAUUUGAU | SEQ ID NO: 1839 | GAAAUGACUGUCUAAGAGA | [symbol] |
| AH0553 | SEQ ID NO: 554 | AAAUGACUGUCUAAGAGAUCU | SEQ ID NO: 1197 | AUCUCUUAGACAGUCAUUUCA | SEQ ID NO: 1840 | AAAUGACUGUCUAAGAGAU | [symbol] |
| AH0554 | SEQ ID NO: 555 | AUGAUGUCUAAGAGAUCUCG | SEQ ID NO: 1198 | AGAUCUCUUAGAGAGUCAUUU | SEQ ID NO: 1841 | AUGACUGUGUAAGAGAUCU | [symbol] |
| AH0555 | SEQ ID NO: 556 | UGACUGUCUAAGAGAUCUGGU | SEQ ID NO: 1199 | CAGAUCUCUUAGACAGUCAUU | SEQ ID NO: 1842 | UGACUGUCUAAGAGAUCUG | [symbol] |
| AH0556 | SEQ ID NO: 557 | GACUGUCUAAGAGAUCUGGUC | SEQ ID NO: 1200 | CAGAUCUCUUAGACAGUCAUU | SEQ ID NO: 1843 | GACUGUCUAAGAGAUCUGG | 0.143 |
| AH0557 | SEQ ID NO: 558 | ACUGUCUAAGAGAUCUGGUCA | SEQ ID NO: 1201 | ACCAGAUCUCUUAGACAGUCA | SEQ ID NO: 1844 | ACUGUCUAAGAGAUCUGGU | 0.202 |
| AH0558 | SEQ ID NO: 559 | CUGUCUAAGAGAUCUGGUCAA | SEQ ID NO: 1202 | GACCAGAUCUCUUAGACAGUC | SEQ ID NO: 1845 | CUGUCUAAGAGAUCUGGUC | 0.118 |
| AH0559 | SEQ ID NO: 560 | UGUCUAAGAGAUCUGGUCAAA | SEQ ID NO: 1203 | UGACCAGaucucuuagacagu | SEQ ID NO: 1846 | UGUGUAAGAGAUCUGGUCA | 0.121 |
| AH0560 | SEQ ID NO: 561 | GUCUAAGAGAUCUGGUCAAAG | SEQ ID NO: 1204 | UUGACCAGAUCUGUUAGACAG | SEQ ID NO: 1847 | GUCUAAGAGAUCUGGUCAA | 0.053 |
| AH0561 | SEQ ID NO: 562 | UCUAAGAGAUCUGCUGAAAGC | SEQ ID NO: 1205 | UUUGACCAGAUCUCUUAGAGA | SEQ ID NO: 1848 | GGUAAGAGAUCUGGUCAAA | [symbol] |
| AH0562 | SEQ ID NO: 563 | CUAAGAGAUCUGGUCAAAGCA | SEQ ID NO: 1206 | CUUUGACCAGAUCUCUUAGAC | SEQ ID NO: 1849 | CUAAGAGAUCUGGUCAAAG | [symbol] |
| AH0563 | SEQ ID NO: 564 | UAAGAGAUCUGGGCAAAGCAA | SEQ ID NO: 1207 | GCUUUGACCAGAUCUCUUAGA | SEQ ID NO: 1850 | UAAGAGAUCUGGUCAAAGC | 0.383 |
| AH0564 | SEQ ID NO: 565 | AAGAGAUCUGGUCAAAGGAAC | SEQ ID NO: 1208 | UGCUUUGAGGAGAUCUCUUAG | SEQ ID NO: 1851 | AAGAGAUCUGGUCAAAGGA | 0.053 |
| AH0565 | SEQ ID NO: 566 | AGAGAUCUGGUCAAAGCAACU | SEQ ID NO: 1209 | UUGCUUUGACGAGAUCGCUUA | SEQ ID NO: 1852 | AGAGAUCUGGUCAAAGCAA | [symbol] |
| AH0566 | SEQ ID NO: 567 | GAGAUCUGCUCAAAGCAACUG | SEQ ID NO: 1210 | GUUGCUUUGACCAGAUCUCUU | SEQ ID NO: 1853 | GAGAUCUGGUCAAAGCAAC | 0.074 |
| AH0567 | SEQ ID NO: 568 | AGAUCUGGUCAAAGCAACUGG | SEQ ID NO: 1211 | AGUUGCUUUGACCAGAUCUCU | SEQ ID NO: 1854 | AGAUCUGGUCAAAGCAACU | [symbol] |
| AH0568 | SEQ ID NO: 569 | GAUCUGGUCAAAGCAACUGGA | SEQ ID NO: 1212 | CAGUUGCGUUGACCAGAUCUC | SEQ ID NO: 1855 | GAUCUGGUCAAAGCAACUG | 0.118 |
| AH0569 | SEQ ID NO: 570 | AUCUGGUCAAAGGAACUGGAU | SEQ ID NO: 1213 | CCAGUUGCUUUGACCAGAUCU | SEQ ID NO: 1856 | AUCUGGUGAAAGCAACUGG | 0.225 |
| AH0570 | SEQ ID NO: 571 | UCUGGUCAAAGCAACUGGAUA | SEQ ID NO: 1214 | UCCAGUUGCUUUGACCAGAUC | SEQ ID NO: 1857 | UCUGGUCAAAGCAACUGGA | 0.105 |
| AH0571 | SEQ ID NO: 572 | CUGGUCAAAGCAACUGGAUAC | SEQ ID NO: 1215 | AUCCAGUUGCUUUGACCAGAU | SEQ ID NO: 1858 | CUGGUCAAAGCAACUGGAU | [symbol] |
| AH0572 | SEQ ID NO: 573 | UGGUCAAAGCAACUGGAUACU | SEQ ID NO: 1216 | UAUCCAGUUGCUUUGAGGAGA | SEQ ID NO: 1859 | UGGUCAAAGCAACUGGAUA | [symbol] |
| AH0573 | SEQ ID NO: 574 | GGUCAAAGGAACUGGAUACUA | SEQ ID NO: 1217 | GUAUCCAGUUGCUUUGACCAG | SEQ ID NO: 1860 | GGUGAAAGCAACUGGAUAG | 0.118 |
| AH0574 | SEQ ID NO: 575 | CUCAAAGCAACUGGAUAGUAG | SEQ ID NO: 1218 | AGUAUCCAGUUGGUUUGACCA | SEQ ID NO: 1861 | GUCAAAGCAACUGGAUACU | [symbol] |
| AH0575 | SEQ ID NO: 576 | UCAAAGCAACUGGAUACUAGA | SEQ ID NO: 1219 | UAGUAUCCAGUUGCUUUGACC | SEQ ID NO: 1862 | UCAAAGCAACUGGAUACUA | [symbol] |
| AH0576 | SEQ ID NO: 577 | CAAAGCAACUGGAUACUAGAU | SEQ ID NO: 1220 | CUAGUAUCCAGUUGCUUUGAG | SEQ ID NO: 1863 | CAAAGGAACUGGAUACUAG | [symbol] |
| AH0577 | SEQ ID NO: 578 | AAAGCAACUGGAUACUAGAUC | SEQ ID NO: 1221 | UCUAGUAUCCAGUUGCUUUGA | SEQ ID NO: 1864 | AAAGCAACUGGAUACUAGA | 0.088 |
| AH0578 | SEQ ID NO: 579 | AACCAACUGGAUACUAGAUCU | SEQ ID NO: 1222 | AUCUAGUAUCCAGUUGCUUUG | SEQ ID NO: 1865 | AAGCAACUGGAUACUAGAU | 0.156 |
| AH0579 | SEQ ID NO: 580 | AGCAACUGGAUACUAGAUCUU | SEQ ID NO: 1223 | GAUCUAGUAUCCAGUUGCUUU | SEQ ID NO: 1866 | AGCAACUGGAUACUAGAUC | 0.248 |
| AH0580 | SEQ ID NO: 581 | GCAACUGGAUACUAGAUCUUA | SEQ ID NO: 1224 | AGAUCGAGUAUCCAGUUCCUU | SEQ ID NO: 1867 | GCAACUGGAUACUAGAUCU | [symbol] |
| AH0581 | SEQ ID NO: 582 | CAACUGGAUACUAGAUCUUAC | SEQ ID NO: 1225 | AAGAUCUAGUAUGCAGUUGCU | SEQ ID NO: 1868 | CAACUGGAUACUAGAUCUU | [symbol] |
| AH0582 | SEQ ID NO: 583 | AACUGGAUAGUAGAUGGUACA | SEQ ID NO: 1226 | UAAGAUCUAGUAUCGAGGGGG | SEQ ID NO: 1869 | AACUGGAUACUAGAUCUUA | 0.101 |
| AH0583 | SEQ ID NO: 584 | ACUGGAUACUAGAUCUUACAU | SEQ ID NO: 1227 | GUAAGAUCUAGUAUCCAGUUG | SEQ ID NO: 1870 | ACUGGAUACUAGAUCUUAC | 0.096 |
| AH0584 | SEQ ID NO: 585 | CUGGAUACUAGAUCUUACAUC | SEQ ID NO: 1228 | UGUAAGAUCUAGUAUCCAGUU | SEQ ID NO: 1871 | CUGGAUACUAGAUCUUACA | 0.075 |
| AH0585 | SEQ ID NO: 586 | UGGAUACUACAUCUUACAUCU | SEQ ID NO: 1229 | AUGUAAGAUGUAGUAUCCAGU | SEQ ID NO: 1872 | UGGAUACUAGAUCUUACAU | [symbol] |
| AH0586 | SEQ ID NO: 587 | GGAUACUAGAUGGUACAUCUG | SEQ ID NO: 1230 | CAUGUAAGAUCUAGUAUCCAG | SEQ ID NO: 1873 | GGAUACUAGAUCUUACAUC | 0.087 |
| AH0587 | SEQ ID NO: 588 | GAUACUAGAUCUUACAUCUGC | SEQ ID NO: 1231 | AGAUGCAAGAUCUAGUAUCCA | SEQ ID NO: 1874 | GAUACUAGAUCUUACAUCU | 0.089 |
| AH0588 | SEQ ID NO: 589 | AUACUAGAUCUUACAUGUGCA | SEQ ID NO: 1232 | CAGAUGUAAGAUCUAGUAUCC | SEQ ID NO: 1875 | AUACUAGAUCUUACAUCUG | 0.105 |
| AH0589 | SEQ ID NO: 590 | ACUAGAUCUUACAUCUGCAGC | SEQ ID NO: 1233 | UGCAGAUGUAAGAUCUAGUAU | SEQ ID NO: 1876 | ACUAGAUCUUACAUCUGCA | [symbol] |
| AH0590 | SEQ ID NO: 591 | CUAGAUCUUACAUCUGCAGCU | SEQ ID NO: 1234 | CUGCAGAUGUAAGAUCUAGUA | SEQ ID NO: 1877 | CUAGAUCUUACAUCUGCAG | [symbol] |
| AH0591 | SEQ ID NO: 592 | AGAUCUUACAUCUGCAGCUCU | SEQ ID NO: 1235 | AGCUGGAGAUGUAAGAUCUAG | SEQ ID NO: 1878 | AGAUCUUACAUCUGCAGCU | 0.112 |
| AH0592 | SEQ ID NO: 593 | GAUCUUACAUCUGCAGCUCUU | SEQ ID NO: 1236 | GAGCUGCAGAUGUAAGAUCUA | SEQ ID NO: 1879 | CAUCUUACAUCUGCAGCUC | 0.086 |
| AH0593 | SEQ ID NO: 594 | AUCUUACAUCUGGAGCUCUUU | SEQ ID NO: 1237 | AGAGCUGCAGAUGUAAGAUGU | SEQ ID NO: 1880 | AUCUUACAUCUGCAGCUCU | 0.059 |
| AH0594 | SEQ ID NO: 595 | UCUUACAUCUGGAGCUCUUUC | SEQ ID NO: 1238 | AAGAGCUGCAGAUGUAAGAUC | SEQ ID NO: 1881 | GCUUACAUCUGGAGGUGUU | [symbol] |
| AH0595 | SEQ ID NO: 596 | CUUACAUCUGCAGGUGUUUCU | SEQ ID NO: 1239 | AAAGAGCUGCAGAUGUAAGAU | SEQ ID NO: 1882 | CUUAGAUCUGCAGCUCUUU | 0.088 |
| AH0596 | SEQ ID NO: 597 | UUACAUGUGCAGCUCUUUCUU | SEQ ID NO: 1240 | GAAAGAGCUGCAGAUGUAAGA | SEQ ID NO: 1883 | UUACAUCUGCAGCUCUUUC | 0.110 |
| AH0597 | SEQ ID NO: 598 | UACAUCUGGAGGUCUUUCUUG | SEQ ID NO: 1241 | AGAAAGAGCUGCAGAUCUAAG | SEQ ID NO: 1884 | UACAUCUGGAGCUCUUUCU | 0.188 |
| AH0598 | SEQ ID NO: 599 | ACAUCUGCAGCUCUUUCUUCU | SEQ ID NO: 1242 | AAGAAAGAGCUGCAGAUGUAA | SEQ ID NO: 1885 | ACAUCUGCAGCUCUUUCUU | [symbol] |
| AH0599 | SEQ ID NO: 600 | CAUCCCCAGCUGUUUCUUCUU | SEQ ID NO: 1243 | GAAGAAAGAGGUGGAGAUGUA | SEQ ID NO: 1886 | CAUCUGCAGCUCUUUCUUC | 0.072 |
| AH0600 | SEQ ID NO: 601 | AUCUGCAGCUCUUUCUUCUUU | SEQ ID NO: 1244 | AGAAGAAAGAGCUGCAGAUGU | SEQ ID NO: 1887 | AUCUGCAGCUCUUUCUUCU | 0.072 |

[symbol]

indicates data missing or illegible when filed

TABLE 1-13

| Double-stranded | | Sense strand sequence | | Antisense strand | | Target APCS mRNA | Relative APCS |
|---|---|---|---|---|---|---|---|
| nucleic acid No. | SEQ ID NO: | (5′→3′) | SEQ ID NO: | sequence (5′→3′) | SEQ ID NO: | sequence | expression level |
| AH0601 | SEQ ID NO: 602 | UCUGCAGCUCUUUCUUCUUUG | SEQ ID NO: 1245 | AAGAAGAAAGAGCUGCAGAUG | SEQ ID NO: 1888 | UCUGCAGCUGUUUCUUCUU | [symbol] |
| AH0602 | SEQ ID NO: 603 | CUGCAGCUCUUUCUUCUUUGA | SEQ ID NO: 1246 | AAAGAAGAAAGAGCUGCAGAU | SEQ ID NO: 1889 | CUGCAGCUCUUUCUUCUUU | 0.097 |
| AH0603 | SEQ ID NO: 604 | UGCAGCUCUUUCUUCUUUGAA | SEQ ID NO: 1247 | CAAAGAAGAAAGAGCUGCAGA | SEQ ID NO: 1890 | UGCAGCUCUUUCUUCUUUG | 0.096 |
| AH0604 | SEQ ID NO: 605 | GCAGCUCUUUCUUCUUUGAAU | SEQ ID NO: 1248 | UCAAAGAAGAAAGAGCUGCAG | SEQ ID NO: 1891 | GCAGCUCUUUCUUCUUUGA | 0.059 |
| AH0605 | SEQ ID NO: 606 | CAGCUCUUUCUUCUUUGAAUU | SEQ ID NO: 1249 | UUCAAAGAAGAAAGAGCUGCA | SEQ ID NO: 1892 | CAGCUCUUUCUUCUUUGAA | 0.054 |
| AH0606 | SEQ ID NO: 607 | AGCUCUUUCUUCUUUGAAUUU | SEQ ID NO: 1250 | AUUCAAAGAAGAAAGAGCUGC | SEQ ID NO: 1893 | AGCUCUUUCUUCUUUGAAU | 0.053 |
| AH0607 | SEQ ID NO: 608 | GCUCUUUCUUCUUUGAAUUUC | SEQ ID NO: 1251 | AAUUCAAAGAAGAAAGAGCUG | SEQ ID NO: 1894 | GCUCUUUCUUCUUUGAAUU | 0.057 |
| AH0608 | SEQ ID NO: 609 | CUCUUUCUUCUUUGAAUUUCC | SEQ ID NO: 1252 | AAAUUCAAAGAAGAAAGAGCU | SEQ ID NO: 1895 | CUCUUUCUUCUUUGAAUUU | 0.068 |
| AH0609 | SEQ ID NO: 610 | UCUUUCUUCUUUGAAUUUCCU | SEQ ID NO: 1253 | GAAAUUCAAAGAAGAAAGAGC | SEQ ID NO: 1896 | UCUUUCUUCUUUGAAUUUC | 0.184 |
| AH0610 | SEQ ID NO: 611 | CUUUCUUUUUUGAAUUUCCUA | SEQ ID NO: 1254 | GGAAAUUCAAAGAAGAAAGAG | SEQ ID NO: 1897 | CUUUCUUCUUUGAAUUUCC | 0.078 |
| AH0611 | SEQ ID NO: 612 | UUUCUUCUUUGAAUUUGCUAU | SEQ ID NO: 1255 | AGGAAAUUCAAAGAAGAAAGA | SEQ ID NO: 1898 | UUUCUUCUUUGAAUGUCCC | [symbol] |
| AH0612 | SEQ ID NO: 613 | UUCUUGUUUGAAUUUCCUAUC | SEQ ID NO: 1256 | UAGGAAAUUCAAAGAAGAAAG | SEQ ID NO: 1899 | UUCUUCUUUGAAUUUCCUA | 0.212 |
| AH0613 | SEQ ID NO: 614 | UCUUCUUUGAAUUUCCUAUCU | SEQ ID NO: 1257 | AUAGGAAAUUCAAAGAAGAAA | SEQ ID NO: 1900 | UCUUCUUUGAAUUUCCUAU | [symbol] |
| AH0614 | SEQ ID NO: 615 | UUCUUUGAAUUUCCUAUCUGU | SEQ ID NO: 1258 | AGAUAGGAAAUUCAAAGAAGA | SEQ ID NO: 1901 | UUCUUUGAAUUUCCUAUCU | 0.171 |
| AH0615 | SEQ ID NO: 616 | UCUUUGAAUUUCCUAUCUGUA | SEQ ID NO: 1259 | CAGAUAGGAAAUUCAAAGAAG | SEQ ID NO: 1902 | UCUUUGAAUUUCCUAUCUG | [symbol] |
| AH0616 | SEQ ID NO: 617 | CUUUGAAUUUCCUAUCUGUAU | SEQ ID NO: 1260 | ACAGAUAGGAAAUUCAAAGAA | SEQ ID NO: 1903 | CUUUGAAUUUCCUAUCUGU | 0.073 |
| AH0617 | SEQ ID NO: 618 | UUUGAAUUUCCUAUCUGUAUG | SEQ ID NO: 1261 | UAGAGAUAGGAAAUUGAAAGA | SEQ ID NO: 1904 | UUUGAAUUUCCUAUCUGUA | [symbol] |
| AH0618 | SEQ ID NO: 619 | UUGAAUUUGCUAUCUGUAUGU | SEQ ID NO: 1262 | AUACAGAUAGGAAAUUCAAAG | SEQ ID NO: 1905 | UUGAAUUUCCUAUCUGUAU | [symbol] |
| AH0619 | SEQ ID NO: 620 | UGAAUUUCGUAUCUGUAUGUC | SEQ ID NO: 1263 | CAUACAGAUAGGAAAUUCAAA | SEQ ID NO: 1906 | UGAAUUUCCUAUCUGUAUG | 0.151 |
| AH0620 | SEQ ID NO: 621 | GAAUUUCCUAUCUUUAUGUCU | SEQ ID NO: 1264 | ACAUACAGAUAGGAAAUUCAA | SEQ ID NO: 1907 | GAAUUUCCUAUCUGUAUGU | 0.066 |
| AH0621 | SEQ ID NO: 622 | AUUUCCUAUCUGUAUGUCUGC | SEQ ID NO: 1265 | AGACAUACAGAUAGGAAAUUC | SEQ ID NO: 1908 | AUUUCCUAUCUGUAUGUCU | [symbol] |
| AH0622 | SEQ ID NO: 623 | UUUCCUAUCUGUAUGUCUGCC | SEQ ID NO: 1266 | CAGACAUACAGAUAGGAAAUU | SEQ ID NO: 1909 | UUUCCUAUCUGUAUGUCUG | 0.222 |
| AH0623 | SEQ ID NO: 624 | UUCCUAUCUGUAUGUCUGCCU | SEQ ID NO: 1267 | GCAGACAUACAGAUAGGAAAU | SEQ ID NO: 1910 | UUUCCUAUCUGUAUGUCUG | 0.474 |
| AH0624 | SEQ ID NO: 625 | UCCUAUCUGUAUGUCUGCCUA | SEQ ID NO: 1268 | GGCAGAGAUACAGAUAGGAAA | SEQ ID NO: 1911 | UUCCUAUCUGUAUGUCUGC | 0.494 |
| AH0625 | SEQ ID NO: 626 | CCUAUCUGUAUGUCUGCCUAA | SEQ ID NO: 1269 | AGGCAGACAUACAGAUAGGAA | SEQ ID NO: 1912 | UCCUAUCUGUAUGUCUGCC | 0.088 |
| AH0626 | SEQ ID NO: 627 | CUAUCUGUAUGUCUGCCUAAU | SEQ ID NO: 1270 | UAGGCAGACAUACAGAUAGGA | SEQ ID NO: 1913 | CCUAUCUGUAUGUCUGCCU | 0.073 |
| AH0627 | SEQ ID NO: 628 | UAUCUGUAUGUCUGCCUAAUU | SEQ ID NO: 1271 | UUAGGCAGACAUACAGAUAGG | SEQ ID NO: 1914 | CUAUCUGUAUGUCUGCCUA | 0.114 |
| AH0628 | SEQ ID NO: 629 | AUGUGUAUGUCUGCCUAAUUA | SEQ ID NO: 1272 | AUUAGGCAGACAUACAGAUAG | SEQ ID NO: 1915 | UAUCUGUAUGUCUGCCUAA | [symbol] |
| AH0629 | SEQ ID NO: 630 | UCUGUAUGUCUGCCUAAUUAA | SEQ ID NO: 1273 | AAUUAGGCAGACAUACAGAUA | SEQ ID NO: 1916 | AUCUGUAUGUCUGCCUAAU | 0.132 |
| AH0630 | SEQ ID NO: 631 | CUGUAUGUCUGCCUAAUUAAA | SEQ ID NO: 1274 | UAAUUAGGCAGACAUACAGAU | SEQ ID NO: 1917 | UCUGUAUGUCUGCCUAAUU | 0.051 |
| AH0631 | SEQ ID NO: 632 | UGUAUGUCUGGGUAAUUAAAA | SEQ ID NO: 1275 | UUAAUUAGGGAGAGAUACAGA | SEQ ID NO: 1918 | CUGUAUGUCUGCCUAAUUA | [symbol] |
| AH0632 | SEQ ID NO: 633 | GUAUGUCUGCCUAAUUAAAAA | SEQ ID NO: 1276 | UUUAAUUAGGCAGACAUACAG | SEQ ID NO: 1919 | GUAUGUCUGCGUAAUUAAA | 0.091 |
| AH0633 | SEQ ID NO: 634 | UAUGUCUGCCUAAUUAAAAAA | SEQ ID NO: 1277 | UUUUAAUUAGGCAGACAUACA | SEQ ID NO: 1920 | UAUGUCUGCCUAAUUAAAA | 0.083 |
| AH0634 | SEQ ID NO: 635 | AUGCCUGGCUAAUUAAAAAAA | SEQ ID NO: 1278 | UUUUUAAUUAGGCAGACAUAC | SEQ ID NO: 1921 | AUGUCUGCCUAAUUAAAAA | 0.081 |
| AH0635 | SEQ ID NO: 636 | UGUCUGCCUAAUUAAAAAAAU | SEQ ID NO: 1279 | UUUUUUAAUUAGGCAGACAUA | SEQ ID NO: 1922 | UGUCUGCCUAAUUAAAAAA | [symbol] |
| AH0636 | SEQ ID NO: 637 | GUCUGCCUAAUUAAAAAAAUA | SEQ ID NO: 1280 | UUUUUUUAAUUAGGCAGACAU | SEQ ID NO: 1923 | GUCUGCCUAAUUAAAAAAA | [symbol] |
| AH0637 | SEQ ID NO: 638 | UGUGCCUAAUUAAAAAAAUAU | SEQ ID NO: 1281 | AUUUUUUUAAUUAGGCAGACA | SEQ ID NO: 1924 | UCUGCCUAAUUAAAAAAAU | 0.113 |
| AH0638 | SEQ ID NO: 639 | CUGGCUAAUUAAAAAAAUAUA | SEQ ID NO: 1282 | UAUUUUUUUAAUUAGGCAGAC | SEQ ID NO: 1925 | CUGCCUAAUUAAAAAAAUA | [symbol] |
| AH0639 | SEQ ID NO: 640 | UGCGUAAUUAAAAAAAUAUAU | SEQ ID NO: 1283 | AUAUUUUUUUAAUUAGGCAGA | SEQ ID NO: 1926 | UGCCUAAUUAAAAAAAUAU | 0.151 |
| AH0640 | SEQ ID NO: 641 | GCCUAAUUAAAAAAAUAUAUA | SEQ ID NO: 1284 | UAUAUUUUUUUAAUUAGGCAG | SEQ ID NO: 1927 | GGCUAAUUAAAAAAAUAUA | 0.191 |
| AH0641 | SEQ ID NO: 642 | CCUAAUUAAAAAAAUAUAUAU | SEQ ID NO: 1285 | AUAUAUUUUUUUAACUAGGCA | SEQ ID NO: 1928 | CCUAAUUAAAAAAAUAUAU | 0.381 |
| AH0642 | SEQ ID NO: 643 | CUAAUUAAAAAAAUAUAUAUU | SEQ ID NO: 1286 | UAUAUAUUUUUUUAAUUAGGC | SEQ ID NO: 1929 | CUAAUUAAAAAAAUAUAUA | 0.287 |
| AH0643 | SEQ ID NO: 644 | UAAAAAAAUAUAUAUUGUAUU | SEQ ID NO: 1287 | UACAAUAUAUAUUUUUUUAAU | SEQ ID NO: 1930 | UAAAAAAAUAUAUAUUGUA | [symbol] |

[symbol]

indicates data missing or illegible when filed

[1020] The nucleotide sequence of full-length APCS 2nd strand cDNA is shown in Table 2.

TABLE 2

| | |
|---|---|
| SEQ ID NO: 1 | gggcatg [symbol] tatcagacgct [symbol] gggggacagac [symbol] tgtgttg [symbol] tgctaccctcatc [symbol] ggtca [symbol] gcttctgctat [symbol] |
| | cag [symbol] cctaggccahha [symbol] tatg [symbol] g [symbol] tgctttgg [symbol] t [symbol] tgt [symbol] t [symbol] g [symbol] tcctggaag [symbol] tttgctca |
| | [symbol] ga [symbol] tcagtg [symbol] ga [symbol] gt [symbol] tttgtatttcctagagaatctgttagtgatc [symbol] t [symbol] tt [symbol] g [symbol] ggag |
| | [symbol] g [symbol] t [symbol] g [symbol] cttaccttgtgttttcgagcctatagtgat [symbol] ctctcgtgcctacagc [symbol] cctac [symbol] ta |
| | cccgagacagggataatgagctactagtttatagag [symbol] gttggagagtat [symbol] tata [symbol] gga [symbol] g [symbol] gt |
| | t [symbol] t [symbol] gttatcgag [symbol] gttcccggct [symbol] cagtgcac [symbol] gtg [symbol] gagctgggagt [symbol] t [symbol] ggt [symbol] tg [symbol] |
| | attttggatcagtgggacacctttggtg [symbol] g [symbol] gtctgc [symbol] cagggttacttt [symbol] g [symbol] gctcg [symbol] ccc [symbol] gattgt [symbol] |
| | atggggcagg [symbol] ggatt [symbol] tgggg [symbol] gtttg [symbol] gg [symbol] tttgtggg [symbol] tggggatttgt [symbol] t |
| | gtgggactctgtgatgcccc [symbol] agaaaatatcatgtctg [symbol] t [symbol] t [symbol] gggta [symbol] cctct [symbol] tgccaatat [symbol] tggact |
| | ggcaggctatg [symbol] ctatgaagtcagaggatatgtcatcatcaaacccttggtgtgggtctgaggtattgactcaacgag |
| | agagcttg [symbol] tg [symbol] tgg [symbol] gg [symbol] |
| | ttctttgaatttcctatctgtatgtctgcctaattaaaaaaatatatattgtgttatgctacctgca [symbol] |
| | [symbol] |

[symbol]

indicates data missing or illegible when filed

### Reference Test Example 2: Measurement of Knockdown Activity of Modified siRNA Against APCS mRNA in Human Cell—1

[1021] Sense strand nucleic acids consisting of ribonucleotides shown in SEQ ID NOs: 1931 to 1974, antisense strand nucleic acids consisting of ribonucleotides shown in SEQ ID NOs: 1975 to 2018, and double-stranded nucleic acids prepared by annealing these strands (the sense strand represented by SEQ ID NO: n (n=1931 to 1974) and the antisense strand represented by SEQ ID NO: [n+44] are paired) were synthesized by commission to GeneDesign, Inc.

[1022] The relative expression level of APCS mRNA was calculated by the same operation as in Reference Test Example 1 except that: the final concentration of each synthesized double-stranded nucleic acid was set to 1 nM or 0.1 nM: and the double-stranded nucleic acid was transferred to RMG-1 cells, which were then cultured for 24 hours. This experiment was conducted four times. Median values of the relative expression level of APCS mRNA are shown in Tables M1-1 and M1-2. In Tables M1-1 and M1-2, N(M) represents 2′-O-methyl-RNA, and N(F) represents 2′-F-RNA.

TABLE M1-1

| | | | | | Relative | Relative |
|---|---|---|---|---|---|---|
| Double- | | | | | APCS | APCS |
| stranded | | | | | expression | expression |
| nucleic | SEQ | Sense strand sequence | | Antisense strand sequence | level | level |
| acid No. | ID NO: | (5′→3′) | SEQ ID NO: | (5′→3′) | 1 nM | 0.1 nM |
| AH0644 | SEQ ID | U(F)A(M)C(F)C(M)U(F)U(M)G(F) | SEQ ID NO: 1975 | U(F)A(M)G(F)G(M)C(F)U(M)G(F)G(M)A(F)A(M)A(M)A(F)C | 0.057 | [symbol] |
| | NO: 1931 | U(M)G(F)U(M)U(F)U(F)U(M)C(F) | | (M)A(F)C(M)A(F)A(M)G(F)G(M)U(F)A(M)A(F)A(M) | | |
| | | G(M)A(F)G(M)C(F)C(M)U(F)A(M) | | | | |
| AH0645 | SEQ ID | U(F)G(M)C(F)C(M)U(F)A(M)C(F) | SEQ ID NO: 1976 | U(F)A(M)G(F)G(M)A(F)G(M)A(F)A(M)G(F)A(M)G(M)G(F)C | 0.083 | [symbol] |
| | NO: 1932 | A(M)G(F)C(M)C(F)U(F)C(M)U(F) | | (M)U(F)G(M)U(F)A(M)G(F)G(M)C(F)A(M)C(F)G(M) | | |
| | | U(M)C(F)U(M)C(F)C(M)U(F)A(M) | | | | |
| AH0646 | SEQ ID | A(F)C(M)A(F)G(M)C(F)C(M)U(F) | SEQ ID NO: 1977 | U(F)A(M)U(F)U(M)G(F)U(M)A(F)G(M)G(F)A(M)G(M)A(F)A | [symbol] | 0.257 |
| | NO: 1933 | C(M)G(F)U(M)C(F)U(F)C(M)C(F) | | (M)G(F)A(M)G(F)G(M)C(F)U(M)G(F)U(M)A(F)G(M) | | |
| | | U(M)A(F)C(M)A(F)A(M)U(F)A(M) | | | | |
| AH0647 | SEQ ID | G(F)U(M)C(F)C(M)U(F)C(M)A(F) | SEQ ID NO: 1978 | U(F)C(M)A(F)G(M)C(F)A(M)A(F)G(M)A(F)C(M)C(M)U(F)G | [symbol] | [symbol] |
| | NO: 1934 | U(M)C(F)A(M)G(F)G(F)U(M)A(F) | | (M)A(F)U(M)G(F)A(M)G(F)G(M)A(F)C(M)U(F)C(M) | | |
| | | U(M)U(F)G(M)C(F)U(M)G(F)A(M) | | | | |
| AH0648 | SEQ ID | A(F)G(M)G(F)A(M)G(F)C(M)C(F) | SEQ ID NO: 1979 | U(F)C(M)C(F)C(M)A(F)C(M)A(F)A(M)A(F)G(M)G(M)A(F)C | [symbol] | 0.355 |
| | NO: 1935 | A(M)G(F)U(M)C(F)C(F)U(M)U(F) | | (M)U(F)G(M)G(F)C(M)U(F)C(M)C(F)U(M)A(F)U(M) | | |
| | | U(M)G(F)U(M)G(F)G(M)G(F)A(M) | | | | |
| AH0649 | SEQ ID | G(F)A(M)G(F)C(M)C(F)A(M)G(F) | SEQ ID NO: 1980 | U(F)C(M)U(F)C(M)C(F)C(M)A(F)C(M)A(F)A(M)A(M)G(F)G | 0.084 | [symbol] |
| | NO: 1936 | U(M)C(F)C(M)U(F)U(F)U(M)G(F) | | (M)A(F)C(M)U(F)G(M)G(F)C(M)U(F)C(M)C(F)U(M) | | |
| | | U(M)G(F)G(M)G(F)A(M)G(F)A(M) | | | | |
| AH0650 | SEQ ID | G(F)C(M)A(F)G(M)U(F)C(M)C(F) | SEQ ID NO: 1981 | A(F)U(M)C(F)U(M)C(F)U(M)C(F)C(M)C(F)A(M)C(M)A(F)A | 0.065 | [symbol] |
| | NO: 1937 | U(M)U(F)U(M)G(F)U(F)G(M)G(F) | | (M)A(F)G(M)G(F)A(M)C(F)U(M)G(F)G(M)C(F)U(M) | | |
| | | G(M)A(F)G(M)A(F)G(M)A(F)U(M) | | | | |
| AH0651 | SEQ ID | C(F)A(M)G(F)U(M)C(F)C(M)U(F) | SEQ ID NO: 1982 | A(F)A(M)U(F)C(M)U(F)C(M)C(F)C(M)C(F)C(M)A(M)C(F)A | 0.093 | [symbol] |
| | NO: 1938 | U(M)U(F)G(M)U(F)G(F)G(M)G(F) | | (M)A(F)A(M)G(F)G(M)A(F)C(M)U(F)G(M)G(F)C(M) | | |
| | | A(M)G(F)A(M)G(F)A(M)U(F)U(M) | | | | |
| AH0652 | SEQ ID | U(F)G(M)G(F)G(M)A(F)G(M)A(F) | SEQ ID NO: 1983 | A(F)C(M)A(F)A(M)A(F)U(M)C(F)C(M)C(F)C(M)A(M)A(F)U | 0.170 | 0.330 |
| | NO: 1939 | G(M)A(F)U(M)U(F)G(F)G(M)G(F) | | (M)C(F)U(M)C(F)U(M)C(F)C(M)C(F)A(M)C(F)A(M) | | |
| | | G(M)A(F)U(M)U(F)U(M)G(F)U(M) | | | | |
| AH0653 | SEQ ID | G(F)C(M)C(F)A(M)G(F)A(M)G(F) | SEQ ID NO: 1984 | U(F)A(M)C(F)A(M)A(F)A(M)U(F)C(M)C(F)C(M)C(M)A(F)A | [symbol] | 0.300 |
| | NO: 1940 | A(M)U(F)U(M)G(F)G(F)G(M)G(F) | | (M)U(F)C(M)U(F)G(M)U(F)C(M)C(F)C(M)A(F)C(M) | | |
| | | A(M)U(F)U(M)U(F)G(M)U(F)A(M) | | | | |
| AH0654 | SEQ ID | G(F)A(M)G(F)A(M)G(F)A(M)U(F) | SEQ ID NO: 1985 | U(F)G(M)U(F)A(M)C(F)A(M)A(F)A(M)U(F)C(M)C(M)C(F)C | 0.094 | [symbol] |
| | NO: 1941 | U(M)G(F)G(M)G(F)G(F)A(M)U(F) | | (M)A(F)A(M)U(F)C(M)U(F)C(M)U(F)C(M)C(F)C(M) | | |
| | | U(M)U(F)G(M)U(F)A(M)C(F)A(M) | | | | |
| AH0655 | SEQ ID | U(F)C(M)C(F)U(M)G(F)U(M)C(F) | SEQ ID NO: 1986 | U(F)A(M)C(F)C(M)C(F)U(M)C(F)A(M)U(F)A(M)C(M)G(F)G | 0.123 | 0.332 |
| | NO: 1942 | U(M)G(F)C(M)C(F)U(F)A(M)U(F) | | (M)A(F)G(M)A(F)C(M)A(F)G(M)G(F)A(M)U(F)A(M) | | |
| | | C(M)A(F)G(M)G(F)G(M)U(F)A(M) | | | | |
| AH0656 | SEQ ID | C(F)A(M)G(F)G(M)C(F)U(M)C(F) | SEQ ID NO: 1987 | G(F)A(M)U(F)U(M)U(F)C(M)A(F)U(M)A(F)G(M)U(M)U(F)C | 0.098 | 0.178 |
| | NO: 1943 | U(M)G(F)A(M)A(F)C(F)U(M)A(F) | | (M)A(F)G(M)A(F)G(M)C(F)C(M)U(F)G(M)C(F)C(M) | | |
| | | U(M)G(F)A(M)A(F)A(M)U(F)C(M) | | | | |
| AH0657 | SEQ ID | G(F)A(M)G(F)G(M)A(F)U(M)A(F) | SEQ ID NO: 1988 | G(F)U(M)U(F)U(M)G(F)A(M)U(F)G(M)A(F)U(M)G(M)A(F)C | 0.147 | [symbol] |
| | NO: 1944 | U(M)G(F)U(M)C(F)A(F)U(M)C(F) | | (M)A(F)U(M)A(F)U(M)C(F)C(M)U(F)C(M)U(F)G(M) | | |
| | | A(M)U(F)C(M)A(F)A(M)A(F)C(M) | | | | |
| AH0658 | SEQ ID | U(F)G(M)G(F)G(M)A(F)A(M)C(F) | SEQ ID NO: 1989 | U(F)G(M)A(F)G(M)U(F)C(M)A(F)A(M)G(F)A(M)C(M)C(F)U | 0.103 | [symbol] |
| | NO: 1945 | G(M)A(F)G(M)A(F)G(F)C(M)A(F) | | (M)C(F)A(M)G(F)A(M)C(F)C(M)C(F)A(M)C(F)A(M) | | |
| | | C(M)U(F)U(M)G(F)A(M)A(F)A(M) | | | | |
| AH0659 | SEQ ID | A(F)C(M)U(F)C(M)A(F)A(M)C(F) | SEQ ID NO: 1990 | U(F)U(M)U(F)C(M)A(F)A(M)G(F)U(M)G(F)C(M)U(M)C(F)U | 0.066 | 0.034 |
| | NO: 1946 | G(M)A(F)G(M)A(F)G(F)C(M)A(F) | | (M)C(F)G(M)U(F)U(M)G(F)A(M)G(F)U(M)C(F)A(M) | | |
| | | G(M)U(F)U(M)G(F)A(M)A(F)A(M) | | | | |
| AH0660 | SEQ ID | C(F)U(M)C(F)A(M)A(F)C(M)G(F) | SEQ ID NO: 1991 | U(F)U(M)U(F)U(M)C(F)A(M)A(F)G(M)U(F)G(M)C(M)U(F)C | 0.067 | [symbol] |
| | NO: 1947 | A(M)G(F)A(M)G(F)C(F)A(M)C(F) | | (M)U(F)C(M)G(F)U(M)U(F)G(M)A(F)G(M)U(F)C(M) | | |
| | | U(M)U(F)G(M)A(F)A(M)A(F)A(M) | | | | |
| AH0661 | SEQ ID | U(F)C(M)A(F)A(M)C(F)G(M)A(F) | SEQ ID NO: 1992 | A(F)U(M)U(F)U(M)U(F)C(M)A(F)A(M)G(F)U(M)G(M)C(F)U | 0.058 | 0.074 |
| | NO: 1948 | G(M)A(F)G(M)C(F)A(F)C(M)U(F) | | (M)C(F)U(M)C(F)G(M)U(F)U(M)G(F)A(M)G(F)U(M) | | |
| | | U(M)G(F)A(M)A(F)A(M)A(F)U(M) | | | | |
| AH0662 | SEQ ID | A(F)A(M)C(F)C(M)A(F)G(M)A(F) | SEQ ID NO: 1993 | U(F)C(M)A(F)U(M)U(F)U(M)U(F)C(M)A(F)A(M)C(M)U(F)G | 0.046 | [symbol] |
| | NO: 1949 | G(M)C(F)A(M)C(F)U(F)U(M)G(F) | | (M)C(F)U(M)C(F)U(M)C(F)G(M)U(F)U(M)G(F)A(M) | | |
| | | A(M)A(F)A(M)A(F)U(M)G(F)A(M) | | | | |
| AH0663 | SEQ ID | S(F)C(M)G(F)A(M)G(F)A(M)G(F) | SEQ ID NO: 1994 | U(F)U(M)C(F)A(M)U(F)U(M)U(F)U(M)C(F)A(M)A(M)G(F)U | 0.053 | [symbol] |
| | NO: 1950 | A(M)C(F)C(M)U(F)U(F)G(M)A(F) | | (M)G(F)C(M)U(F)C(M)U(F)C(M)G(F)U(M)U(F)G(M) | | |
| | | A(M)A(F)A(M)U(F)G(M)A(F)A(M) | | | | |
| AH0664 | SEQ ID | C(F)G(M)A(F)G(M)A(F)G(M)C(F) | SEQ ID NO: 1995 | U(F)U(M)U(F)C(M)A(F)U(M)U(F)U(M)U(F)C(M)A(M)A(F)G | 0.057 | [symbol] |
| | NO: 1951 | A(M)C(F)U(M)U(F)G(F)A(M)A(F) | | (M)U(F)G(M)C(F)U(M)C(F)U(M)C(F)G(M)U(F)U(M) | | |
| | | A(M)A(F)U(M)G(F)A(M)A(F)A(M) | | | | |
| AH0665 | SEQ ID | G(F)A(M)G(F)A(M)G(F)C(M)A(F) | SEQ ID NO: 1996 | A(F)U(M)U(F)U(M)C(F)A(M)U(F)U(M)U(F)U(M)C(M)A(F)A | 0.062 | 0.032 |
| | NO: 1952 | C(M)U(F)U(M)G(F)A(F)A(M)A(F) | | (M)G(F)U(M)G(F)C(M)U(F)C(M)U(F)C(M)G(F)U(M) | | |
| | | A(M)U(F)G(M)A(F)A(M)A(F)U(M) | | | | |

[symbol]

indicates data missing or illegible when filed

TABLE M1-2

| | | | | | Relative | Relative |
|---|---|---|---|---|---|---|
| Double- | | | | | APCS | APCS |
| stranded | | | | | expression | expression |
| nucleic | | Sense strand sequence | | Antisense strand sequence | level | level |
| acid No. | SEQ ID NO: | (5′→3′) | SEQ ID NO: | (5′→3′) | 1 nM | 0.1 nM |
| AH0666 | SEQ ID NO: 1953 | A(F)G(M)A(F)G(M)C(F)A(M)C(F) | SEQ ID NO: 1997 | C(F)A(M)U(F)U(M)U(F)C(M)A(F)U(M)U(F)U(M)U(M)C(F) | 0.082 | 0.083 |
| | | U(M)U(F)G(M)A(F)A(F)A(M)A(F) | | A(M)A(F)G(M)U(F)G(M)C(F)U(M)C(F)U(M)C(F)G(M) | | |
| | | U(M)G(F)A(M)A(F)A(M)U(F)G(M) | | | | |
| AH0667 | SEQ ID NO: 1954 | C(F)U(M)A(F)A(M)G(F)A(M)G(F) | SEQ ID NO: 1998 | U(F)G(M)C(F)U(M)U(F)U(M)C(F)A(M)C(F)G(M)A(M)G(F) | [symbol] | 0.131 |
| | | A(M)U(F)C(M)U(F)G(F)G(M)U(F) | | A(M)U(F)C(M)U(F)C(M)U(F)U(M)A(F)G(M)A(F)C(M) | | |
| | | C(M)A(F)A(M)A(F)G(M)C(F)A(M) | | | | |
| AH0668 | SEQ ID NO: 1955 | C(F)U(M)G(F)G(M)U(F)C(M)A(F) | SEQ ID NO: 1999 | G(F)U(M)A(F)U(M)C(F)C(M)A(F)C(M)U(F)A(M)G(M)C(F) | 0.157 | 0.318 |
| | | A(M)A(F)G(M)C(F)A(F)A(M)C(F) | | U(M)U(F)U(M)G(F)A(M)C(F)C(M)A(F)G(M)A(F)U(M) | | |
| | | U(M)G(F)G(M)A(F)U(M)A(F)C(M) | | | | |
| AH0669 | SEQ ID NO: 1956 | A(F)A(M)G(F)C(M)A(F)A(M)C(F) | SEQ ID NO: 2000 | A(F)G(M)A(F)U(M)C(F)U(M)A(F)G(M)U(F)A(M)U(M)G(F) | 0.083 | 0.126 |
| | | U(M)G(F)G(M)A(F)U(F)A(M)C(F) | | G(M)A(F)G(M)U(F)U(M)G(F)C(M)U(F)U(M)U(F)G(M) | | |
| | | U(M)A(F)G(M)A(F)U(M)C(F)U(M) | | | | |
| AH0670 | SEQ ID NO: 1957 | A(F)G(M)C(F)A(M)A(F)C(M)U(F) | SEQ ID NO: 2001 | A(F)A(M)G(F)A(M)U(F)C(M)U(F)A(M)G(F)U(M)A(M)U(F) | 0.071 | 0.129 |
| | | G(M)G(F)A(M)U(F)A(F)C(M)U(F) | | C(M)C(F)A(M)G(F)U(M)U(F)G(M)G(F)U(M)U(F)U(M) | | |
| | | A(M)G(F)A(M)U(F)C(M)U(F)U(M) | | | | |
| AH0671 | SEQ ID NO: 1958 | G(F)C(M)A(F)A(M)C(F)U(M)G(F) | SEQ ID NO: 2002 | U(F)A(M)A(F)G(M)A(F)U(M)C(F)U(M)A(F)G(M)U(M)A(F) | [symbol] | 0.131 |
| | | G(M)A(F)U(M)A(F)C(F)U(M)A(F) | | U(M)G(F)C(M)A(F)G(M)U(F)U(M)C(F)C(M)U(F)U(M) | | |
| | | G(M)A(F)U(M)G(F)U(M)U(F)A(M) | | | | |
| AH0672 | SEQ ID NO: 1959 | A(F)U(M)C(F)U(M)U(F)A(M)C(F) | SEQ ID NO: 2003 | A(F)A(M)A(F)G(M)A(F)G(M)C(F)U(M)G(F)C(M)A(M)G(F) | 0.072 | [symbol] |
| | | A(M)U(F)C(M)U(F)G(F)C(M)A(F) | | A(M)U(F)G(M)U(F)A(M)A(F)C(M)A(F)U(M)C(F)U(M) | | |
| | | G(M)C(F)U(M)C(F)U(M)U(F)U(M) | | | | |
| AH0673 | SEQ ID NO: 1960 | U(F)A(M)C(F)A(M)U(F)C(M)U(F) | SEQ ID NO: 2004 | G(F)A(M)A(F)G(M)A(F)A(M)A(F)C(M)A(F)G(M)C(M)U(F) | [symbol] | 0.112 |
| | | G(M)C(F)A(M)G(F)C(F)U(M)C(F) | | G(M)C(F)A(M)G(F)A(M)U(F)G(M)U(F)A(M)A(F)G(M) | | |
| | | U(M)U(F)U(M)C(F)U(M)U(F)G(M) | | | | |
| AH0674 | SEQ ID NO: 1961 | A(F)G(M)A(F)U(M)C(F)U(M)G(F) | SEQ ID NO: 2005 | A(F)G(M)A(F)A(M)G(F)A(M)A(F)A(M)G(F)A(M)G(M)C(F) | [symbol] | [symbol] |
| | | C(M)A(F)G(M)C(F)U(F)C(M)U(F) | | U(M)G(F)C(M)A(F)G(M)A(F)U(M)G(F)U(M)A(F)A(M) | | |
| | | U(M)U(F)C(M)U(F)U(M)C(F)U(M) | | | | |
| AH0675 | SEQ ID NO: 1962 | C(F)A(M)U(F)C(M)U(F)C(M)C(F) | SEQ ID NO: 2006 | A(F)A(M)G(F)A(M)A(F)G(M)A(F)A(M)A(F)G(M)A(M)G(F) | [symbol] | 0.114 |
| | | A(M)C(F)C(M)U(F)G(F)U(M)U(F) | | C(M)U(F)G(M)C(F)A(M)G(F)A(M)U(F)C(M)U(F)A(M) | | |
| | | U(M)C(F)U(M)U(F)C(M)U(F)U(M) | | | | |
| AH0676 | SEQ ID NO: 1963 | A(F)U(M)C(F)U(M)G(F)C(M)A(F) | SEQ ID NO: 2007 | A(F)A(M)A(F)G(M)A(F)A(M)G(F)A(M)A(F)A(M)G(M)A(F) | 0.093 | 0.144 |
| | | G(M)C(F)U(M)C(F)U(F)U(M)U(F) | | G(M)C(F)U(M)G(F)G(M)A(F)G(M)A(F)U(M)G(F)U(M) | | |
| | | C(M)U(F)U(M)C(F)U(M)U(F)U(M) | | | | |
| AH0677 | SEQ ID NO: 1964 | U(F)C(M)U(F)G(M)C(F)A(M)G(F) | SEQ ID NO: 2008 | C(F)A(M)A(F)A(M)G(F)A(M)A(F)G(M)A(F)A(M)A(M)G(F) | 0.064 | 0.093 |
| | | C(M)U(F)C(M)U(F)U(F)U(M)C(F) | | A(M)G(F)C(M)U(F)G(M)C(F)A(M)G(F)A(M)U(F)G(M) | | |
| | | U(M)U(F)C(M)U(F)U(M)U(F)G(M) | | | | |
| AH0678 | SEQ ID NO: 1965 | C(F)U(M)G(F)C(M)A(F)G(M)C(F) | SEQ ID NO: 2009 | U(F)C(M)A(F)A(M)A(F)G(M)A(F)A(M)G(F)A(M)A(M)A(F) | 0.089 | 0.100 |
| | | U(M)C(F)U(M)U(F)U(F)C(M)U(F) | | G(M)A(F)G(M)C(F)A(M)G(F)C(M)A(F)G(M)A(F)U(M) | | |
| | | U(M)C(F)U(M)U(F)U(M)G(F)A(M) | | | | |
| AH0679 | SEQ ID NO: 1966 | U(F)G(M)C(F)A(M)G(F)C(M)U(F) | SEQ ID NO: 2010 | U(F)U(M)C(F)A(M)A(F)A(M)G(F)A(M)A(F)G(M)A(M)A(F) | 0.101 | 0.158 |
| | | C(M)U(F)U(M)U(F)C(F)U(M)U(F) | | A(M)G(F)A(M)G(F)C(M)U(F)G(M)C(F)A(M)G(F)A(M) | | |
| | | C(M)U(F)U(M)U(F)G(M)A(F)A(M) | | | | |
| AH0680 | SEQ ID NO: 1967 | G(F)C(M)A(F)G(M)C(F)U(M)C(F) | SEQ ID NO: 2011 | A(F)U(M)U(F)C(M)A(F)A(M)A(F)G(M)A(F)A(M)G(M)A(F) | [symbol] | 0.112 |
| | | U(M)U(F)U(M)C(F)U(F)U(M)C(F) | | A(M)A(F)G(M)A(F)G(M)C(F)U(M)G(F)C(M)A(F)G(M) | | |
| | | U(M)U(F)U(M)G(F)A(M)A(F)U(M) | | | | |
| AH0681 | SEQ ID NO: 1968 | C(F)A(M)G(F)C(M)U(F)C(M)U(F) | SEQ ID NO: 2012 | A(F)A(M)U(F)U(M)C(F)A(M)A(F)A(M)G(F)A(M)A(M)G(F) | [symbol] | 0.113 |
| | | U(M)U(F)G(M)U(F)U(F)C(M)U(F) | | A(M)A(F)A(M)G(F)A(M)G(F)C(M)U(F)G(M)C(F)A(M) | | |
| | | U(M)U(F)G(M)A(F)A(M)U(F)U(M) | | | | |
| AH0682 | SEQ ID NO: 1969 | U(F)U(M)G(F)A(M)A(F)A(M)U(F) | SEQ ID NO: 2013 | A(F)G(M)A(F)U(M)A(F)C(M)A(F)G(M)A(F)U(M)A(M)G(F) | 0.052 | [symbol] |
| | | U(M)C(F)C(M)U(F)A(F)U(M)C(F) | | G(M)A(F)A(M)A(F)U(M)U(F)G(M)A(F)A(M)A(F)G(M) | | |
| | | U(M)G(F)U(M)A(F)U(M)G(F)U(M) | | | | |
| AH0683 | SEQ ID NO: 1970 | U(F)C(M)C(F)U(M)A(F)U(M)C(F) | SEQ ID NO: 2014 | U(F)A(M)G(F)G(M)C(F)A(M)G(F)A(M)C(F)A(M)U(M)A(F) | [symbol] | 0.038 |
| | | U(M)G(F)U(M)A(F)U(F)G(M)U(F) | | C(M)A(F)G(M)A(F)U(M)A(F)G(M)G(F)A(M)A(F)A(M) | | |
| | | G(M)U(F)G(M)C(F)C(M)U(F)A(M) | | | | |
| AH0684 | SEQ ID NO: 1971 | A(F)U(M)C(F)U(M)G(F)U(M)A(F) | SEQ ID NO: 2015 | U(F)A(M)A(F)U(M)U(F)A(M)G(F)G(M)C(F)A(M)G(M)A(F) | [symbol] | 0.083 |
| | | U(M)G(F)U(M)C(F)U(F)G(M)C(F) | | C(M)A(F)U(M)A(F)G(M)A(F)G(M)A(F)U(M)A(F)G(M) | | |
| | | C(M)U(F)A(M)A(F)U(M)U(F)A(M) | | | | |
| AH0685 | SEQ ID NO: 1972 | U(F)C(M)U(F)G(M)U(F)A(M)U(F) | SEQ ID NO: 2016 | U(F)U(M)A(F)A(M)U(F)U(M)A(F)G(M)G(F)C(M)A(M)G(F) | 0.073 | [symbol] |
| | | G(M)U(F)C(M)U(F)G(F)C(M)C(F) | | A(M)C(F)A(M)U(F)A(M)C(F)A(M)G(F)A(M)U(F)A(M) | | |
| | | U(M)A(F)A(M)U(F)U(M)A(F)A(M) | | | | |
| AH0686 | SEQ ID NO: 1973 | C(F)U(M)G(F)U(M)A(F)U(M)G(F) | SEQ ID NO: 2017 | U(F)U(M)U(F)A(M)A(F)U(M)U(F)A(M)G(F)G(M)C(M)A(F) | 0.148 | [symbol] |
| | | U(M)C(F)U(M)G(F)C(F)C(M)U(F) | | G(M)A(F)G(M)A(F)U(M)A(F)C(M)A(F)G(M)A(F)U(M) | | |
| | | A(M)A(F)U(M)U(F)A(M)A(F)A(M) | | | | |
| AH0687 | SEQ ID NO: 1974 | G(F)U(M)G(F)U(M)G(F)C(M)C(F) | SEQ ID NO: 2018 | U(F)A(M)U(F)U(M)U(F)U(M)U(F)U(M)U(F)A(M)A(M)U(F) | 0.078 | [symbol] |
| | | U(M)A(F)A(M)U(F)U(F)A(M)A(F) | | U(M)A(F)G(M)G(F)C(M)A(F)G(M)A(F)C(M)A(F)U(M) | | |
| | | A(M)A(F)A(M)A(F)A(M)U(F)A(M) | | | | |

[symbol]

indicates data missing or illegible when filed

### Reference Test Example 3: Measurement of Knockdown Activity of Modified siRNA Against APCS mRNA in Human Cell—2

[1023] The double-stranded nucleic acids described in Table M1-3 were synthesized by GeneDesign, Inc. and used. Specifically, the double-stranded nucleic acids were prepared by annealing sense strands consisting of ribonucleotides shown in SEQ ID NOs: 2019 to 2043 and antisense strands consisting of ribonucleotides shown in SEQ ID NOs: 2044 to 2068 (the sense strand represented by SEQ ID NO: n (n=2019 to 2043) and the antisense strand represented by SEQ ID NO: [n+25] are paired). A siRNA/RNAiMax mixed solution of each double-stranded nucleic acid and RNAiMax transfection reagent (manufactured by Thermo Fisher Scientific Inc., Catalog No. 13778150) diluted with Opti-MEM I Reduced Serum Medium (manufactured by Thermo Fisher Scientific Inc., Catalog No. 31985070) was added at 20 μL/well to 96-well culture plates. Human ovary cancer-derived cell line RMG-I cells (JCRB Cell Bank, JCRB0172) were inoculated at 10,000 cells/60 μL/well to the 96-well culture plates and cultured at 37° C. for 24 hours under 5% CO₂ conditions. The medium used was Ham's F-12 Nutrient Mix medium (manufactured by Thermo Fisher Scientific Inc., Catalog No. 11765-047) containing 10% fetal bovine serum (manufactured by Thermo Fisher Scientific Inc., Catalog No. 10091-148). The final concentration of the double-stranded nucleic acid was set to 1 or 0.1 nM. Then, the cells were washed with DPBS, no calcium, no magnesium (manufactured by Thermo Fisher Scientific Inc., Catalog No. 14190-144), and the recovery of total RNA from each of the plates and the preparation of cDNA through reverse-transcription reaction using the obtained total RNA as a template were performed using SuperPrep Cell Lysis & RT Kit for qPCR (manufactured by Toyobo Co., Ltd., Catalog No. SCQ-101) according to the method described in the instruction attached to the product. This cDNA was added at 3 μL/well to MicroAmp Optical 384-well plate (manufactured by Applied Biosystems, Inc., Catalog No. 4309849), and further, 10 μL of TaqMan Gene Expression Master Mix (manufactured by Applied Biosystems, Inc., Catalog No. 4369016), 6 μL of UltraPure Distilled Water (manufactured by Thermo Fisher Scientific Inc., Catalog No. 10977-015), and 1 μL of human APCS probe or 1 μL of human GAPDH (D-glyceraldehyde-3-phosphate dehydrogenase) probe were added to each well. The real-time PCR of the human APCS gene and the human GAPDH gene was performed using QuantStudio 12K Flex real-time PCR system (manufactured by Thermo Fisher Scientific Inc.). GAPDH, a constitutively expressed gene, was measured as an internal control and used to correct the APCS gene expression level. The amount of APCS mRNA in RMG-I cells treated with only the transfection reagent without the addition of siRNA was defined as 1.0. The relative expression level of APCS mRNA was calculated when each siRNA was transferred. This experiment was conducted twice. Average values of the relative expression level of APCS mRNA are shown in Table M1-3. In Table M1-3, N(M) represents 2′-O-methyl-modified RNA, and N(F) represents 2′-fluorine-modified RNA.

TABLE M1-3

| | | | | Relative | Relative |
|---|---|---|---|---|---|
| | | | | APCS | APCS |
| | | | | expression | expression |
| SEQ ID | Sense strand sequence | SEQ ID | Antisense strand sequence | level | level |
| NO: | (5′→3′) | NO: | (5′→3′) | 1 nM | 0.1 nM |
| SEQ ID | U(F)A(M)C(F)C(M)U(F)U(M)G(F)U(M)G(F)U(M)U(F) | SEQ ID | U(M)A(F)G(F)G(M)C(F)U(M)C(F)G(M)A(F)A(M)A(M)A(F)C(M)A | 0.388 | 0.988 |
| NO: 2019 | U(F)U(M)C(F)G(M)A(F)G(M)C(F)C(M)U(M)A(F) | NO: 2044 | (F)C(M)A(F)A(M)G(F)G(M)U(F)A(M)A(F)A(M) | | |
| SEQ ID | U(M)A(M)C(M)C(M)U(M)U(M)G(F)U(M)G(F)U(M)U(F) | SEQ ID | U(M)A(F)G(F)G(F)C(F)U(F)C(F)G(F)A(F)A(M)A(M)A(F)C(M)A | 0.033 | [symbol] |
| NO: 2020 | U(F)U(M)C(M)G(M)A(M)G(M)C(M)C(M)U(M)A(M) | NO: 2045 | (F)C(M)A(F)A(F)G(F)G(F)U(F)A(F)A(F)A(M) | | |
| SEQ ID | U(M)A(M)C(F)C(M)U(F)U(M)G(F)U(M)G(F)U(M)U(F) | SEQ ID | U(M)A(F)G(F)G(M)C(F)U(M)C(F)G(M)A(F)A(M)A(M)A(F)C(M)A | 0.089 | 0.308 |
| NO: 2021 | U(F)U(M)C(F)G(M)A(F)G(M)C(M)C(M)U(M)A(M) | NO: 2046 | (F)C(M)A(F)A(M)G(F)G(M)U(M)A(M)A(M)A(M) | | |
| SEQ ID | U(M)G(M)G(M)G(M)U(M)C(M)U(F)G(M)A(F)G(M)G(F) | SEQ ID | U(M)G(F)A(F)G(F)U(F)C(F)A(F)A(F)G(F)A(M)C(M)C(F)U(M)C(F) | 0.186 | 0.364 |
| NO: 2022 | U(F)G(M)U(M)U(M)C(M)A(M)C(M)U(M)C(M)A(M) | NO: 2047 | A(M)G(F)A(F)C(F)G(F)G(F)A(F)C(F)A(M) | | |
| SEQ ID | U(M)G(M)G(F)G(M)U(F)C(M)U(F)G(M)A(F)G(M)G(F) | SEQ ID | U(M)G(F)A(F)G(M)U(F)C(M)(F)(M)G(F)A(M)C(M)C(F)U(M)C | 0.088 | [symbol] |
| NO: 2023 | U(F)G(M)U(F)U(M)G(F)A(M)C(M)U(M)C(M)A(M) | NO: 2048 | (F)A(M)G(F)A(M)C(F)C(M)C(M)A(M)C(M)A(M) | | |
| SEQ ID | A(F)G(M)A(F)G(M)C(F)A(M)C(F)U(M)U(F)G(M)A(F) | SEQ ID | C(M)A(F)U(F)U(M)U(F)C(M)A(F)U(M)U(F)U(M)U(M)C(F)A(M)A | [symbol] | [symbol] |
| NO: 2024 | A(F)A(M)A(F)U(M)G(F)A(M)A(F)A(M)U(M)G(F) | NO: 2049 | (F)G(M)U(F)G(M)C(F)U(M)C(F)U(M)C(F)G(M) | | |
| SEQ ID | A(M)G(M)A(M)G(M)C(M)A(M)C(F)U(M)U(F)G(M)A(F) | SEQ ID | C(M)A(F)U(F)U(F)U(F)C(F)A(F)U(F)U(F)U(M)U(M)C(F)A(M)A(F) | [symbol] | [symbol] |
| NO: 2025 | A(F)A(M)A(M)U(M)G(M)A(M)A(M)A(M)U(M)G(M) | NO: 2050 | G(M)U(F)G(F)C(F)U(F)C(F)U(F)C(F)G(M) | | |
| SEQ ID | A(M)G(M)A(F)G(M)C(F)A(M)C(F)U(M)U(F)G(M)A(F) | SEQ ID | C(M)A(F)U(F)U(M)U(F)C(M)A(F)U(M)U(F)U(M)U(M)C(F)A(M)A | 0.014 | [symbol] |
| NO: 2026 | A(F)A(M)A(F)U(M)G(F)A(M)A(M)A(M)U(M)G(M) | NO: 2051 | (F)G(M)U(F)G(M)C(F)U(M)C(M)U(M)C(M)G(M) | | |
| SEQ ID | U(F)C(M)U(F)G(M)C(F)A(M)G(F)C(M)U(F)G(M)U(F) | SEQ ID | C(M)A(F)A(F)A(M)G(F)A(M)A(F)G(M)A(F)A(M)A(M)G(F)A(M)G | [symbol] | [symbol] |
| NO: 2027 | U(F)U(M)C(F)U(M)U(F)C(M)U(F)U(M)U(M)G(F) | NO: 2052 | (F)G(M)U(F)G(M)C(F)A(M)C(F)A(M)U(F)G(M) | | |
| SEQ ID | U(M)C(M)U(M)G(M)C(M)A(M)G(F)C(M)U(F)C(M)U(F) | SEQ ID | C(M)A(F)A(F)A(F)G(F)A(F)A(F)G(F)A(F)A(M)A(M)G(F)A(M)G(F) | 0.045 | 0.098 |
| NO: 2028 | U(F)U(M)C(M)U(M)U(M)C(M)U(M)U(M)U(M)G(M) | NO: 2053 | C(M)U(F)G(F)C(F)A(F)G(F)A(F)U(F)G(M) | | |
| SEQ ID | U(M)C(M)U(F)G(M)C(F)A(M)G(F)C(M)U(F)C(M)U(F) | SEQ ID | C(M)A(F)A(F)A(M)G(F)A(M)A(F)G(M)A(F)A(M)A(M)G(F)A(M)G | [symbol] | [symbol] |
| NO: 2029 | U(F)U(M)C(F)U(M)U(F)C(M)U(M)U(M)U(M)G(M) | NO: 2054 | (F)C(M)U(F)G(M)C(F)A(M)G(M)A(M)U(M)G(M) | | |
| SEQ ID | G(M)C(M)A(M)G(M)C(M)U(M)C(F)U(M)U(F)U(M)C(F) | SEQ ID | A(M)U(F)U(F)C(F)A(F)A(F)A(F)G(F)A(F)A(M)G(M)A(F)A(M)A | [symbol] | [symbol] |
| NO: 2030 | U(F)U(M)C(M)U(M)U(M)U(M)G(M)A(M)A(M)U(M) | NO: 2055 | (F)G(M)A(F)G(G)C(F)U(F)G(F)C(F)A(F)G(M) | | |
| SEQ ID | G(M)C(M)A(F)G(M)C(F)U(M)C(F)U(M)U(F)U(M)C(F) | SEQ ID | A(M)U(F)U(F)C(M)A(F)A(M)A(F)G(M)A(F)A(M)G(M)A(F)A(M)A | 0.053 | [symbol] |
| NO: 2031 | U(F)U(M)C(F)U(M)U(F)U(M)G(M)A(M)A(M)U(M) | NO: 2056 | (F)G(M)A(F)G(M)C(F)U(M)G(M)C(M)A(M)G(M) | | |
| SEQ ID | C(M)A(M)G(M)C(M)U(M)U(M)U(F)U(M)U(F)C(M)U(F) | SEQ ID | A(M)A(F)U(F)U(F)C(F)A(F)A(F)A(F)G(F)A(M)A(M)G(F)A(M)A | [symbol] | [symbol] |
| NO: 2032 | U(F)C(M)U(M)U(M)U(M)G(M)A(M)A(M)U(M)U(M) | NO: 2057 | (F)A(M)G(F)A(F)G(F)C(F)U(F)G(F)C(F)A(M) | | |
| SEQ ID | G(M)A(M)G(F)C(M)U(F)C(M)U(F)U(M)U(F)C(M)U(F) | SEQ ID | A(M)A(F)U(F)U(M)C(F)A(M)A(F)A(M)G(F)A(M)A(M)G(F)A(M)A | [symbol] | [symbol] |
| NO: 2033 | U(F)C(M)U(F)U(M)U(F)G(M)A(M)A(M)U(M)U(M) | NO: 2058 | (F)A(M)G(F)A(M)G(F)C(M)U(M)G(M)C(M)A(M) | | |
| SEQ ID | U(M)U(M)G(M)A(M)A(M)U(M)U(F)U(M)G(F)C(M)U(F) | SEQ ID | A(M)C(F)A(F)U(F)A(F)G(F)A(F)G(F)A(F)U(M)A(M)G(F)G(M)A(F) | [symbol] | [symbol] |
| NO: 2034 | A(F)U(M)G(M)U(M)G(M)U(M)U(M)U(M)G(M)U(M) | NO: 2059 | A(M)A(F)U(F)U(F)C(F)A(F)A(F)A(F)G(M) | | |
| SEQ ID | U(M)U(M)G(F)A(M)A(F)U(M)U(F)U(M)C(F)C(M)U(F) | SEQ ID | A(M)C(F)A(F)U(M)A(F)C(M)A(F)G(M)A(F)U(M)A(M)G(F)G(M)A | 0.086 | 0.075 |
| NO: 2035 | A(F)U(M)C(F)U(M)G(F)U(M)A(M)U(M)G(M)U(M) | NO: 2060 | (F)A(M)A(F)U(M)U(F)C(M)A(M)A(M)A(M)G(M) | | |
| SEQ ID | AGGCACUUGAAAUGAAAUA | SEQ ID | UAUUUCAUUUUCAAGCUGCUCG | [symbol] | 0.085 |
| NO: 2036 | | NO: 2061 | | | |
| SEQ ID | A(F)G(M)A(F)G(M)C(F)A(M)C(F)U(M)U(F)G(M)A(F) | SEQ ID | U(F)A(M)U(F)U(M)U(F)C(M)A(F)U(M)U(F)U(M)U(M)C(F)A(M)A | [symbol] | 0.060 |
| NO: 2037 | A(F)A(M)A(F)U(M)G(F)A(M)A(F)A(M)U(F)G(M) | NO: 2062 | (F)G(M)U(F)G(M)C(F)U(M)C(F)U(M)C(G)G(M) | | |
| SEQ ID | A(M)G(M)A(M)G(M)C(M)A(M)C(F)U(M)U(F)G(M)A(F) | SEQ ID | U(M)A(F)U(F)U(F)U(F)C(F)A(F)U(F)U(F)U(M)U(M)C(F)A(M)A | [symbol] | [symbol] |
| NO: 2038 | A(F)A(M)A(M)U(M)G(M)A(M)A(M)A(M)U(M)A(M) | NO: 2063 | (F)G(M)U(F)G(F)C(F)U(F)C(F)U(F)C(F)G(M) | | |
| SEQ ID | A(M)G(M)A(F)G(M)C(F)A(M)C(F)U(M)U(F)G(M)A(F) | SEQ ID | U(M)A(F)U(F)U(M)U(F)C(M)A(F)U(M)U(F)U(M)U(M)C(F)A(M)A | [symbol] | 0.062 |
| NO: 2039 | A(F)A(M)A(F)U(M)G(F)A(M)A(M)A(M)U(M)A(M) | NO: 2064 | (F)G(M)U(F)G(M)C(F)U(M)C(M)U(M)C(M)G(M) | | |
| SEQ ID | UCUGCAGCUCUUUCUUCUUUA | SEQ ID | UAAAGAAGAAAGAGCUGCAGAUG | [symbol] | [symbol] |
| NO: 2040 | | NO: 2065 | | | |
| SEQ ID | U(F)C(M)U(F)G(M)C(F)A(M)G(F)C(M)U(F)G(M)U(F) | SEQ ID | U(F)A(M)A(F)A(M)G(F)A(M)A(F)G(M)A(F)A(M)A(M)G(F)A(M)G(F) | 0.010 | [symbol] |
| NO: 2041 | U(F)U(M)C(F)U(M)U(F)C(M)U(F)U(M)U(F)A(M) | NO: 2066 | C(M)U(F)G(M)C(F)A(M)G(F)A(M)U(F)G(M) | | |
| SEQ ID | U(M)C(M)U(M)G(M)C(M)A(M)G(F)C(M)U(F)C(M)U(F) | SEQ ID | U(M)A(F)A(F)A(F)G(F)A(F)A(F)G(F)A(F)A(M)A(M)G(F)A(M)G(F) | [symbol] | 0.072 |
| NO: 2042 | U(F)U(M)C(M)U(M)U(M)C(M)U(M)U(M)U(M)A(M) | NO: 2067 | C(M)U(F)G(F)C(F)A(F)G(F)A(F)U(F)G(M) | | |
| SEQ ID | U(M)C(M)U(F)G(M)C(F)A(M)G(F)C(M)U(F)C(M)U(F) | SEQ ID | U(M)A(F)A(F)A(M)G(F)A(M)A(F)G(M)A(F)A(M)A(M)G(F)A(M)G(F) | [symbol] | [symbol] |
| NO: 2043 | U(F)U(M)C(F)U(M)U(F)C(M)U(M)U(M)U(M)A(M) | NO: 2068 | C(M)U(F)G(M)C(F)A(M)G(M)A(M)U(M)G(M) | | |

[symbol]

indicates data missing or illegible when filed

### Test Example 1 APCS mRNA Knockdown Test of Nucleic Acid Conjugate Against Human Primary Liver Cell

[1024] The in vitro knockdown activity of each nucleic acid conjugate obtained in Examples 1 to 43 was measured in human primary liver cells. Each nucleic acid conjugate diluted with Opti-MEM (manufactured by Thermo Fisher Scientific Inc., 31985) such that the final concentration of this nucleic acid conjugate was 300, 30, 3 or 0.3 nmol/L was dispensed at 20 μL/well to a 96-well culture plate coated with collagen I (manufactured by Corning Inc., Catalog No. 356407). Then, human primary liver cells (manufactured by Biopredic International, Catalog No. HEP187) suspended in a plating medium (manufactured by Biopredic International, Catalog No. LV0304-2) were inoculated at 10,000 cells/80 μL/well thereto and cultured at 37° C. for 6 hours under 5% CO₂ conditions. Then, the culture supernatant was carefully removed, and an incubation medium (manufactured by Biopredic International, Catalog No. LV0304-2) was added thereto so that each nucleic acid conjugate was applied to the human primary liver cells. 20 μL of Opti-MEM was applied to human primary liver cells, which were in turn used as a negative control group. The cells supplemented with each nucleic acid conjugate were cultured at 37° C. for 18 hours in a 5% CO₂ incubator and washed with ice-cooled phosphate-buffered saline (DPBS) (manufactured by Nacalai Tesque, Inc., Catalog No. 14249-95). The recovery of total RNA from each of the plates and the preparation of cDNA through reverse-transcription reaction using the obtained total RNA as a template were performed using SuperPrep Cell Lysis & RT Kit for qPCR (manufactured by Toyobo Co., Ltd., Catalog No. SCQ-101) according to the method described in the instruction attached to the product. This cDNA was added at 3 μL/well to MicroAmp Optical 384-well plate (manufactured by Applied Biosystems, Inc., Catalog No. 4309849), and further, 10 μL of TaqMan Gene Expression Master Mix (manufactured by Applied Biosystems, Inc., Catalog No. 4369016), 6 μL of UltraPure Distilled Water (manufactured by Thermo Fisher Scientific Inc., Catalog No. 10977-015), and 1 μL of human APCS probe (manufactured by Applied Biosystems, Inc.) or 1 μL of human GAPDH probe (manufactured by Applied Biosystems, Inc.) were added to each well. The real-time PCR of the human APCS gene and the human GAPDH gene was performed using QuantStudio 12K Flex real-time PCR system (manufactured by Thermo Fisher Scientific Inc.) according to the method described in the attached instruction manual. GAPDH, a constitutively expressed gene, was measured as an internal control and used to correct the APCS gene expression level. The semiquantitative value of APCS mRNA in the negative control measured in the same way as above was defined as 1.0. The relative expression level of APCS mRNA was calculated when each nucleic acid conjugate was transferred. This experiment was conducted twice. Average values of the relative expression level of APCS mRNA are shown in Table S1.

TABLE S1
APCS mRNA expression rate

| Compound | 300 nM | 30 nM | 3 nM | 0.3 nM |
|---|---|---|---|---|
| 1-2 | 0.127 | 0.223 | 0.461 | 0.852 |
| 2-2 | 0.309 | 0.459 | 0.596 | 0.977 |
| 3-2 | 0.366 | 0.516 | 0.765 | 0.919 |
| 4-2 | 0.254 | 0.386 | 0.596 | 0.874 |
| 5-2 | 0.075 | 0.096 | 0.141 | 0.451 |
| 6-2 | 0.377 | 0.499 | 0.669 | 0.841 |
| 7-2 | 0.187 | 0.314 | 0.652 | 0.959 |
| 8-2 | 0.180 | 0.273 | 0.509 | 0.893 |
| 9-2 | 0.145 | 0.272 | 0.456 | 0.885 |
| 10-2 | 0.087 | 0.125 | 0.258 | 0.682 |
| 11-2 | 0.130 | 0.244 | 0.676 | 0.987 |
| 12-2 | NT | NT | NT | NT |
| 13-2 | NT | NT | NT | NT |
| 14-2 | NT | NT | NT | NT |
| 15-2 | 0.051 | 0.056 | 0.204 | 0.731 |
| 16-2 | NT | NT | NT | NT |
| 17-2 | 0.122 | 0.220 | 0.920 | 0.965 |
| 18-2 | 0.184 | 0.374 | 0.993 | 0.988 |
| 19-2 | 0.144 | 0.286 | 0.989 | 1.218 |
| 20-2 | 0.064 | 0.120 | 0.395 | 0.925 |
| 21-2 | NT | NT | NT | NT |
| 22-2 | NT | NT | NT | NT |
| 23-2 | NT | NT | NT | NT |
| 24-2 | NT | NT | NT | NT |
| 25-2 | 0.177 | 0.337 | 0.874 | 1.021 |
| 26-2 | NT | NT | NT | NT |
| 27-2 | NT | NT | NT | NT |
| 28-2 | NT | NT | NT | NT |
| 29-2 | NT | NT | NT | NT |
| 30-2 | NT | NT | NT | NT |
| 31-2 | NT | NT | NT | NT |
| 32-2 | NT | NT | NT | NT |
| 33-2 | 0.046 | 0.082 | 0.384 | 0.880 |
| 34-2 | NT | NT | NT | NT |
| 35-2 | 0.051 | 0.076 | 0.442 | 0.984 |
| 36-2 | NT | NT | NT | NT |
| 37-2 | NT | NT | NT | NT |
| 38-2 | NT | NT | NT | NT |
| 39-2 | NT | NT | NT | NT |
| 40-2 | NT | NT | NT | NT |
| 41-2 | NT | NT | NT | NT |
| 42-2 | NT | NT | NT | NT |
| 43-2 | NT | NT | NT | NT |

[1025] As is evident from Table S1, each nucleic acid conjugate inhibited the mRNA expression of the APCS gene after being added to human primary liver cells.

### Test Example 2 In Vivo Knockdown Test of Nucleic Acid Conjugate in Mouse

[1026] An in vivo knockdown test was conducted on each nucleic acid conjugate obtained in Examples 1 to 43 by the following method. Each nucleic acid conjugate was diluted with phosphate-buffered saline (DPBS) (manufactured by Nacalai Tesque, Inc.) according to the test and used. The mice used were human liver cell-transplanted PXB mice (PXB/human Hepatocyte repopulated cDNA-uPA/SCID Tg, obtained from PhoenixBio Co., Ltd.). The nucleic acid conjugate was evaluated for its effect on human APCS. After acclimatization of the PXB mice, each nucleic acid conjugate was subcutaneously administered to the mice. The dose was 10 mg/kg, and the dose was 5 mL/kg. For a control group, DPBS alone was subcutaneously administered to the mice. Six days before the administration and 1, 2, 3, 6, 10 and 13 days after the administration, blood was collected and centrifuged at 1500×g to obtain serum. The serum thus obtained was used to evaluate the amount of human APCS in blood using human SAP ELISA (SAP, Human, ELISA kit, manufactured by Hycult Biotech Inc., #HK331-02). ELISA was carried out according to the attached manual. Changes in human APCS concentration in blood of each mouse group are shown in FIG. 1. The APCS expression ratio (%) of the nucleic acid conjugate administration group to the DPBS administration group is shown in Table S2.

TABLE S2
APCS protein expression rate (vs. DPBS
administration group) on 13 days after administration at
dose of 10 mg/kg

| Compound | Expression rate |
|---|---|
| 1-2 | NT |
| 2-2 | NT |
| 3-2 | NT |
| 4-2 | NT |
| 5-2 | 18.62 |
| 6-2 | NT |
| 7-2 | NT |
| 8-2 | NT |
| 9-2 | NT |
| 10-2 | NT |
| 11-2 | NT |
| 12-2 | NT |
| 13-2 | NT |
| 14-2 | NT |
| 15-2 | NT |
| 16-2 | NT |
| 17-2 | NT |
| 18-2 | NT |
| 19-2 | NT |
| 20-2 | NT |
| 21-2 | NT |
| 22-2 | NT |
| 23-2 | NT |
| 24-2 | NT |
| 25-2 | NT |
| 26-2 | NT |
| 27-2 | NT |
| 28-2 | NT |
| 29-2 | NT |
| 30-2 | NT |
| 31-2 | NT |
| 32-2 | NT |
| 33-2 | 31.36 |
| 34-2 | NT |
| 35-2 | 31.31 |
| 36-2 | NT |
| 37-2 | NT |
| 38-2 | NT |
| 39-2 | NT |
| 40-2 | NT |
| 41-2 | NT |
| 42-2 | NT |
| 43-2 | NT |

[1027] As is evident from Table S2, the nucleic acid conjugate of the present invention was found to decrease APCS protein expression in mouse peripheral blood by administration to mice expressing human APCS.

### INDUSTRIAL APPLICABILITY

[1028] The nucleic acid conjugate of the present invention can be used for treating an amyloid-related disease in vivo by administration to a mammal.

The application's sequence listing, which the Patent Office published only in electronic form, follows.

SEQUENCE LISTING (2154 sequences)

SEQ ID NO: 1 - DNA, 960 bp, Homo sapiens
gggcatgaatatcagacgctagggggacagccactgtgttgtctgctaccctcatcctggtcactgcttctgctataacagccctaggccaggaatatgaacaagccgctgctttggatctctgtcctcaccagcctcctggaagcctttgctcacacagacctcagtgggaaggtgtttgtatttcctagagaatctgttactgatcatgtaaacttgatcacaccgctggagaagcctctacagaactttaccttgtgttttcgagcctatagtgatctctctcgtgcctacagcctcttctcctacaatacccaaggcagggataatgagctactagtttataaagaaagagttggagagtatagtctatacattggaagacacaaagttacatccaaagttatcgaaaagttcccggctccagtgcacatctgtgtgagctgggagtcctcatcaggtattgctgaattttggatcaatgggacacctttggtgaaaaagggtctgcgacagggttactttgtagaagctcagcccaagattgtcctggggcaggaacaggattcctatgggggcaagtttgataggagccagtcctttgtgggagagattggggatttgtacatgtgggactctgtgctgcccccagaaaatatcctgtctgcctatcagggtacccctctccctgccaatatcctggactggcaggctctgaactatgaaatcagaggatatgtcatcatcaaacccttggtgtgggtctgaggtcttgactcaacgagagcacttgaaaatgaaatgactgtctaagagatctggtcaaagcaactggatactagatcttacatctgcagctctttcttctttgaatttcctatctgtatgtctgcctaattaaaaaaatatatattgtattatgctacctgcaaaaaaaaaaaaaaaaaaaaaaaaaaaaaa

SEQ ID NO: 2 - RNA, 21 nt, Artificial Sequence
  siRNA sense strand against APCS
gcaugaauaucagacgcuagg

SEQ ID NO: 3 - RNA, 21 nt, Artificial Sequence
  siRNA sense strand against APCS
caugaauaucagacgcuaggg

SEQ ID NO: 4 - RNA, 21 nt, Artificial Sequence
  siRNA sense strand against APCS
auaucagacgcuagggggaca

SEQ ID NO: 5 - RNA, 21 nt, Artificial Sequence
  siRNA sense strand against APCS
cuagggggacagccacugugu

SEQ ID NO: 6 - RNA, 21 nt, Artificial Sequence
  siRNA sense strand against APCS
agggggacagccacuguguug

SEQ ID NO: 7 - RNA, 21 nt, Artificial Sequence
  siRNA sense strand against APCS
ggggacagccacuguguuguc

SEQ ID NO: 8 - RNA, 21 nt, Artificial Sequence
  siRNA sense strand against APCS
gggacagccacuguguugucu

SEQ ID NO: 9 - RNA, 21 nt, Artificial Sequence
  siRNA sense strand against APCS
ggacagccacuguguugucug

SEQ ID NO: 10 - RNA, 21 nt, Artificial Sequence
  siRNA sense strand against APCS
gacagccacuguguugucugc

SEQ ID NO: 11 - RNA, 21 nt, Artificial Sequence
  siRNA sense strand against APCS
gccacuguguugucugcuacc

SEQ ID NO: 12 - RNA, 21 nt, Artificial Sequence
  siRNA sense strand against APCS
ccacuguguugucugcuaccc

SEQ ID NO: 13 - RNA, 21 nt, Artificial Sequence
  siRNA sense strand against APCS
cacuguguugucugcuacccu

SEQ ID NO: 14 - RNA, 21 nt, Artificial Sequence
  siRNA sense strand against APCS
cuguguugucugcuacccuca

SEQ ID NO: 15 - RNA, 21 nt, Artificial Sequence
  siRNA sense strand against APCS
uguguugucugcuacccucau

SEQ ID NO: 16 - RNA, 21 nt, Artificial Sequence
  siRNA sense strand against APCS
guguugucugcuacccucauc

SEQ ID NO: 17 - RNA, 21 nt, Artificial Sequence
  siRNA sense strand against APCS
uguugucugcuacccucaucc

SEQ ID NO: 18 - RNA, 21 nt, Artificial Sequence
  siRNA sense strand against APCS
guugucugcuacccucauccu

SEQ ID NO: 19 - RNA, 21 nt, Artificial Sequence
  siRNA sense strand against APCS
gucugcuacccucauccuggu

SEQ ID NO: 20 - RNA, 21 nt, Artificial Sequence
  siRNA sense strand against APCS
cugcuacccucauccugguca

SEQ ID NO: 21 - RNA, 21 nt, Artificial Sequence
  siRNA sense strand against APCS
gcuacccucauccuggucacu

SEQ ID NO: 22 - RNA, 21 nt, Artificial Sequence
  siRNA sense strand against APCS
cuacccucauccuggucacug

SEQ ID NO: 23 - RNA, 21 nt, Artificial Sequence
  siRNA sense strand against APCS
uacccucauccuggucacugc

SEQ ID NO: 24 - RNA, 21 nt, Artificial Sequence
  siRNA sense strand against APCS
acccucauccuggucacugcu

SEQ ID NO: 25 - RNA, 21 nt, Artificial Sequence
  siRNA sense strand against APCS
cccucauccuggucacugcuu

SEQ ID NO: 26 - RNA, 21 nt, Artificial Sequence
  siRNA sense strand against APCS
ccucauccuggucacugcuuc

SEQ ID NO: 27 - RNA, 21 nt, Artificial Sequence
  siRNA sense strand against APCS
cucauccuggucacugcuucu

SEQ ID NO: 28 - RNA, 21 nt, Artificial Sequence
  siRNA sense strand against APCS
cauccuggucacugcuucugc

SEQ ID NO: 29 - RNA, 21 nt, Artificial Sequence
  siRNA sense strand against APCS
auccuggucacugcuucugcu

SEQ ID NO: 30 - RNA, 21 nt, Artificial Sequence
  siRNA sense strand against APCS
uccuggucacugcuucugcua

SEQ ID NO: 31 - RNA, 21 nt, Artificial Sequence
  siRNA sense strand against APCS
ccuggucacugcuucugcuau

SEQ ID NO: 32 - RNA, 21 nt, Artificial Sequence
  siRNA sense strand against APCS
cuggucacugcuucugcuaua

SEQ ID NO: 33 - RNA, 21 nt, Artificial Sequence
  siRNA sense strand against APCS
uggucacugcuucugcuauaa

SEQ ID NO: 34 - RNA, 21 nt, Artificial Sequence
  siRNA sense strand against APCS
ggucacugcuucugcuauaac

SEQ ID NO: 35 - RNA, 21 nt, Artificial Sequence
  siRNA sense strand against APCS
gucacugcuucugcuauaaca

SEQ ID NO: 36 - RNA, 21 nt, Artificial Sequence
  siRNA sense strand against APCS
cacugcuucugcuauaacagc

SEQ ID NO: 37 - RNA, 21 nt, Artificial Sequence
  siRNA sense strand against APCS
acugcuucugcuauaacagcc

SEQ ID NO: 38 - RNA, 21 nt, Artificial Sequence
  siRNA sense strand against APCS
cugcuucugcuauaacagccc

SEQ ID NO: 39 - RNA, 21 nt, Artificial Sequence
  siRNA sense strand against APCS
gcuucugcuauaacagcccua

SEQ ID NO: 40 - RNA, 21 nt, Artificial Sequence
  siRNA sense strand against APCS
cuucugcuauaacagcccuag

SEQ ID NO: 41 - RNA, 21 nt, Artificial Sequence
  siRNA sense strand against APCS
uucugcuauaacagcccuagg

SEQ ID NO: 42 - RNA, 21 nt, Artificial Sequence
  siRNA sense strand against APCS
ucugcuauaacagcccuaggc

SEQ ID NO: 43 - RNA, 21 nt, Artificial Sequence
  siRNA sense strand against APCS
cugcuauaacagcccuaggcc

SEQ ID NO: 44 - RNA, 21 nt, Artificial Sequence
  siRNA sense strand against APCS
ugcuauaacagcccuaggcca

SEQ ID NO: 45 - RNA, 21 nt, Artificial Sequence
  siRNA sense strand against APCS
gcuauaacagcccuaggccag

SEQ ID NO: 46 - RNA, 21 nt, Artificial Sequence
  siRNA sense strand against APCS
cuauaacagcccuaggccagg

SEQ ID NO: 47 - RNA, 21 nt, Artificial Sequence
  siRNA sense strand against APCS
uauaacagcccuaggccagga

SEQ ID NO: 48 - RNA, 21 nt, Artificial Sequence
  siRNA sense strand against APCS
auaacagcccuaggccaggaa

SEQ ID NO: 49 - RNA, 21 nt, Artificial Sequence
  siRNA sense strand against APCS
uaacagcccuaggccaggaau

SEQ ID NO: 50 - RNA, 21 nt, Artificial Sequence
  siRNA sense strand against APCS
acagcccuaggccaggaauau

SEQ ID NO: 51 - RNA, 21 nt, Artificial Sequence
  siRNA sense strand against APCS
cagcccuaggccaggaauaug

SEQ ID NO: 52 - RNA, 21 nt, Artificial Sequence
  siRNA sense strand against APCS
agcccuaggccaggaauauga

SEQ ID NO: 53 - RNA, 21 nt, Artificial Sequence
  siRNA sense strand against APCS
gcccuaggccaggaauaugaa

SEQ ID NO: 54 - RNA, 21 nt, Artificial Sequence
  siRNA sense strand against APCS
cccuaggccaggaauaugaac

SEQ ID NO: 55 - RNA, 21 nt, Artificial Sequence
  siRNA sense strand against APCS
ccuaggccaggaauaugaaca

SEQ ID NO: 56 - RNA, 21 nt, Artificial Sequence
  siRNA sense strand against APCS
cuaggccaggaauaugaacaa

SEQ ID NO: 57 - RNA, 21 nt, Artificial Sequence
  siRNA sense strand against APCS
uaggccaggaauaugaacaag

SEQ ID NO: 58 - RNA, 21 nt, Artificial Sequence
  siRNA sense strand against APCS
aggccaggaauaugaacaagc

SEQ ID NO: 59 - RNA, 21 nt, Artificial Sequence
  siRNA sense strand against APCS
ggccaggaauaugaacaagcc

SEQ ID NO: 60 - RNA, 21 nt, Artificial Sequence
  siRNA sense strand against APCS
gccaggaauaugaacaagccg

SEQ ID NO: 61 - RNA, 21 nt, Artificial Sequence
  siRNA sense strand against APCS
ccaggaauaugaacaagccgc

SEQ ID NO: 62 - RNA, 21 nt, Artificial Sequence
  siRNA sense strand against APCS
caggaauaugaacaagccgcu

SEQ ID NO: 63 - RNA, 21 nt, Artificial Sequence
  siRNA sense strand against APCS
aggaauaugaacaagccgcug

SEQ ID NO: 64 - RNA, 21 nt, Artificial Sequence
  siRNA sense strand against APCS
ggaauaugaacaagccgcugc

SEQ ID NO: 65 - RNA, 21 nt, Artificial Sequence
  siRNA sense strand against APCS
gaauaugaacaagccgcugcu

SEQ ID NO: 66 - RNA, 21 nt, Artificial Sequence
  siRNA sense strand against APCS
aauaugaacaagccgcugcuu

SEQ ID NO: 67 - RNA, 21 nt, Artificial Sequence
  siRNA sense strand against APCS
auaugaacaagccgcugcuuu

SEQ ID NO: 68 - RNA, 21 nt, Artificial Sequence
  siRNA sense strand against APCS
uaugaacaagccgcugcuuug

SEQ ID NO: 69 - RNA, 21 nt, Artificial Sequence
  siRNA sense strand against APCS
augaacaagccgcugcuuugg

SEQ ID NO: 70 - RNA, 21 nt, Artificial Sequence
  siRNA sense strand against APCS
ugaacaagccgcugcuuugga

SEQ ID NO: 71 - RNA, 21 nt, Artificial Sequence
  siRNA sense strand against APCS
gaacaagccgcugcuuuggau

SEQ ID NO: 72 - RNA, 21 nt, Artificial Sequence
  siRNA sense strand against APCS
aacaagccgcugcuuuggauc

SEQ ID NO: 73 - RNA, 21 nt, Artificial Sequence
  siRNA sense strand against APCS
acaagccgcugcuuuggaucu

SEQ ID NO: 74 - RNA, 21 nt, Artificial Sequence
  siRNA sense strand against APCS
caagccgcugcuuuggaucuc

SEQ ID NO: 75 - RNA, 21 nt, Artificial Sequence
  siRNA sense strand against APCS
aagccgcugcuuuggaucucu

SEQ ID NO: 76 - RNA, 21 nt, Artificial Sequence
  siRNA sense strand against APCS
agccgcugcuuuggaucucug

SEQ ID NO: 77 - RNA, 21 nt, Artificial Sequence
  siRNA sense strand against APCS
gccgcugcuuuggaucucugu

SEQ ID NO: 78 - RNA, 21 nt, Artificial Sequence
  siRNA sense strand against APCS
ccgcugcuuuggaucucuguc

SEQ ID NO: 79 - RNA, 21 nt, Artificial Sequence
  siRNA sense strand against APCS
cgcugcuuuggaucucugucc

SEQ ID NO: 80 - RNA, 21 nt, Artificial Sequence
  siRNA sense strand against APCS
gcugcuuuggaucucuguccu

SEQ ID NO: 81 - RNA, 21 nt, Artificial Sequence
  siRNA sense strand against APCS
cugcuuuggaucucuguccuc

SEQ ID NO: 82 - RNA, 21 nt, Artificial Sequence
  siRNA sense strand against APCS
ugcuuuggaucucuguccuca

SEQ ID NO: 83 - RNA, 21 nt, Artificial Sequence
  siRNA sense strand against APCS
gcuuuggaucucuguccucac

SEQ ID NO: 84 - RNA, 21 nt, Artificial Sequence
  siRNA sense strand against APCS
cuuuggaucucuguccucacc

SEQ ID NO: 85 - RNA, 21 nt, Artificial Sequence
  siRNA sense strand against APCS
uuuggaucucuguccucacca

SEQ ID NO: 86 - RNA, 21 nt, Artificial Sequence
  siRNA sense strand against APCS
ggaucucuguccucaccagcc

SEQ ID NO: 87 - RNA, 21 nt, Artificial Sequence
  siRNA sense strand against APCS
gaucucuguccucaccagccu

SEQ ID NO: 88 - RNA, 21 nt, Artificial Sequence
  siRNA sense strand against APCS
cucuguccucaccagccuccu

SEQ ID NO: 89 - RNA, 21 nt, Artificial Sequence
  siRNA sense strand against APCS
cuguccucaccagccuccugg

SEQ ID NO: 90 - RNA, 21 nt, Artificial Sequence
  siRNA sense strand against APCS
uguccucaccagccuccugga

SEQ ID NO: 91 - RNA, 21 nt, Artificial Sequence
  siRNA sense strand against APCS
guccucaccagccuccuggaa

SEQ ID NO: 92 - RNA, 21 nt, Artificial Sequence
  siRNA sense strand against APCS
uccucaccagccuccuggaag

SEQ ID NO: 93 - RNA, 21 nt, Artificial Sequence
  siRNA sense strand against APCS
cucaccagccuccuggaagcc

SEQ ID NO: 94 - RNA, 21 nt, Artificial Sequence
  siRNA sense strand against APCS
ucaccagccuccuggaagccu

SEQ ID NO: 95 - RNA, 21 nt, Artificial Sequence
  siRNA sense strand against APCS
accagccuccuggaagccuuu

SEQ ID NO: 96 - RNA, 21 nt, Artificial Sequence
  siRNA sense strand against APCS
ccagccuccuggaagccuuug

SEQ ID NO: 97 - RNA, 21 nt, Artificial Sequence
  siRNA sense strand against APCS
cagccuccuggaagccuuugc

SEQ ID NO: 98 - RNA, 21 nt, Artificial Sequence
  siRNA sense strand against APCS
agccuccuggaagccuuugcu

SEQ ID NO: 99 - RNA, 21 nt, Artificial Sequence
  siRNA sense strand against APCS
gccuccuggaagccuuugcuc

SEQ ID NO: 100 - RNA, 21 nt, Artificial Sequence
  siRNA sense strand against APCS
ccuccuggaagccuuugcuca

SEQ ID NO: 101 - RNA, 21 nt, Artificial Sequence
  siRNA sense strand against APCS
cuccuggaagccuuugcucac

SEQ ID NO: 102 - RNA, 21 nt, Artificial Sequence
  siRNA sense strand against APCS
uccuggaagccuuugcucaca

SEQ ID NO: 103 - RNA, 21 nt, Artificial Sequence
  siRNA sense strand against APCS
ccuggaagccuuugcucacac

SEQ ID NO: 104 - RNA, 21 nt, Artificial Sequence
  siRNA sense strand against APCS
cuggaagccuuugcucacaca

SEQ ID NO: 105 - RNA, 21 nt, Artificial Sequence
  siRNA sense strand against APCS
ggaagccuuugcucacacaga

SEQ ID NO: 106 - RNA, 21 nt, Artificial Sequence
  siRNA sense strand against APCS
gaagccuuugcucacacagac

SEQ ID NO: 107 - RNA, 21 nt, Artificial Sequence
  siRNA sense strand against APCS
aagccuuugcucacacagacc

SEQ ID NO: 108 - RNA, 21 nt, Artificial Sequence
  siRNA sense strand against APCS
agccuuugcucacacagaccu

SEQ ID NO: 109 - RNA, 21 nt, Artificial Sequence
  siRNA sense strand against APCS
gccuuugcucacacagaccuc

SEQ ID NO: 110 - RNA, 21 nt, Artificial Sequence
  siRNA sense strand against APCS
ccuuugcucacacagaccuca

SEQ ID NO: 111 - RNA, 21 nt, Artificial Sequence
  siRNA sense strand against APCS
cuuugcucacacagaccucag

SEQ ID NO: 112 - RNA, 21 nt, Artificial Sequence
  siRNA sense strand against APCS
uuugcucacacagaccucagu

SEQ ID NO: 113 - RNA, 21 nt, Artificial Sequence
  siRNA sense strand against APCS
ugcucacacagaccucagugg

SEQ ID NO: 114 - RNA, 21 nt, Artificial Sequence
  siRNA sense strand against APCS
cucacacagaccucaguggga

SEQ ID NO: 115 - RNA, 21 nt, Artificial Sequence
  siRNA sense strand against APCS
cacacagaccucagugggaag

SEQ ID NO: 116 - RNA, 21 nt, Artificial Sequence
  siRNA sense strand against APCS
acacagaccucagugggaagg

SEQ ID NO: 117 - RNA, 21 nt, Artificial Sequence
  siRNA sense strand against APCS
cacagaccucagugggaaggu

SEQ ID NO: 118 - RNA, 21 nt, Artificial Sequence
  siRNA sense strand against APCS
agaccucagugggaagguguu

SEQ ID NO: 119 - RNA, 21 nt, Artificial Sequence
  siRNA sense strand against APCS
gaccucagugggaagguguuu

SEQ ID NO: 120 - RNA, 21 nt, Artificial Sequence
  siRNA sense strand against APCS
accucagugggaagguguuug

SEQ ID NO: 121 - RNA, 21 nt, Artificial Sequence
  siRNA sense strand against APCS
ccucagugggaagguguuugu

SEQ ID NO: 122 - RNA, 21 nt, Artificial Sequence
  siRNA sense strand against APCS
cucagugggaagguguuugua

SEQ ID NO: 123 - RNA, 21 nt, Artificial Sequence
  siRNA sense strand against APCS
ucagugggaagguguuuguau

SEQ ID NO: 124 - RNA, 21 nt, Artificial Sequence
  siRNA sense strand against APCS
cagugggaagguguuuguauu

SEQ ID NO: 125 - RNA, 21 nt, Artificial Sequence
  siRNA sense strand against APCS
agugggaagguguuuguauuu

SEQ ID NO: 126 - RNA, 21 nt, Artificial Sequence
  siRNA sense strand against APCS
gugggaagguguuuguauuuc

SEQ ID NO: 127 - RNA, 21 nt, Artificial Sequence
  siRNA sense strand against APCS
ugggaagguguuuguauuucc

SEQ ID NO: 128 - RNA, 21 nt, Artificial Sequence
  siRNA sense strand against APCS
gggaagguguuuguauuuccu

SEQ ID NO: 129 - RNA, 21 nt, Artificial Sequence
  siRNA sense strand against APCS
ggaagguguuuguauuuccua

SEQ ID NO: 130 - RNA, 21 nt, Artificial Sequence
  siRNA sense strand against APCS
gaagguguuuguauuuccuag

SEQ ID NO: 131 - RNA, 21 nt, Artificial Sequence
  siRNA sense strand against APCS
aagguguuuguauuuccuaga

SEQ ID NO: 132 - RNA, 21 nt, Artificial Sequence
  siRNA sense strand against APCS
agguguuuguauuuccuagag

SEQ ID NO: 133 - RNA, 21 nt, Artificial Sequence
  siRNA sense strand against APCS
gguguuuguauuuccuagaga

SEQ ID NO: 134 - RNA, 21 nt, Artificial Sequence
  siRNA sense strand against APCS
guguuuguauuuccuagagaa

SEQ ID NO: 135 - RNA, 21 nt, Artificial Sequence
  siRNA sense strand against APCS
uguuuguauuuccuagagaau

SEQ ID NO: 136 - RNA, 21 nt, Artificial Sequence
  siRNA sense strand against APCS
guuuguauuuccuagagaauc

SEQ ID NO: 137 - RNA, 21 nt, Artificial Sequence
  siRNA sense strand against APCS
uuuguauuuccuagagaaucu

SEQ ID NO: 138 - RNA, 21 nt, Artificial Sequence
  siRNA sense strand against APCS
uuguauuuccuagagaaucug

SEQ ID NO: 139 - RNA, 21 nt, Artificial Sequence
  siRNA sense strand against APCS
uguauuuccuagagaaucugu

SEQ ID NO: 140 - RNA, 21 nt, Artificial Sequence
  siRNA sense strand against APCS
guauuuccuagagaaucuguu

SEQ ID NO: 141 - RNA, 21 nt, Artificial Sequence
  siRNA sense strand against APCS
uauuuccuagagaaucuguua

SEQ ID NO: 142 - RNA, 21 nt, Artificial Sequence
  siRNA sense strand against APCS
auuuccuagagaaucuguuac

SEQ ID NO: 143 - RNA, 21 nt, Artificial Sequence
  siRNA sense strand against APCS
uuuccuagagaaucuguuacu

SEQ ID NO: 144 - RNA, 21 nt, Artificial Sequence
  siRNA sense strand against APCS
uccuagagaaucuguuacuga

SEQ ID NO: 145 - RNA, 21 nt, Artificial Sequence
  siRNA sense strand against APCS
ccuagagaaucuguuacugau

SEQ ID NO: 146 - RNA, 21 nt, Artificial Sequence
  siRNA sense strand against APCS
cuagagaaucuguuacugauc

SEQ ID NO: 147 - RNA, 21 nt, Artificial Sequence
  siRNA sense strand against APCS
uagagaaucuguuacugauca

SEQ ID NO: 148 - RNA, 21 nt, Artificial Sequence
  siRNA sense strand against APCS
agagaaucuguuacugaucau

SEQ ID NO: 149 - RNA, 21 nt, Artificial Sequence
  siRNA sense strand against APCS
gagaaucuguuacugaucaug

SEQ ID NO: 150 - RNA, 21 nt, Artificial Sequence
  siRNA sense strand against APCS
agaaucuguuacugaucaugu

SEQ ID NO: 151 - RNA, 21 nt, Artificial Sequence
  siRNA sense strand against APCS
gaaucuguuacugaucaugua

SEQ ID NO: 152 - RNA, 21 nt, Artificial Sequence
  siRNA sense strand against APCS
aaucuguuacugaucauguaa

SEQ ID NO: 153 - RNA, 21 nt, Artificial Sequence
  siRNA sense strand against APCS
aucuguuacugaucauguaaa

SEQ ID NO: 154 - RNA, 21 nt, Artificial Sequence
  siRNA sense strand against APCS
ucuguuacugaucauguaaac

SEQ ID NO: 155 - RNA, 21 nt, Artificial Sequence
  siRNA sense strand against APCS
cuguuacugaucauguaaacu

SEQ ID NO: 156 - RNA, 21 nt, Artificial Sequence
  siRNA sense strand against APCS
uguuacugaucauguaaacuu

SEQ ID NO: 157 - RNA, 21 nt, Artificial Sequence
  siRNA sense strand against APCS
guuacugaucauguaaacuug

SEQ ID NO: 158 - RNA, 21 nt, Artificial Sequence
  siRNA sense strand against APCS
acugaucauguaaacuugauc

SEQ ID NO: 159 - RNA, 21 nt, Artificial Sequence
  siRNA sense strand against APCS
cugaucauguaaacuugauca

SEQ ID NO: 160 - RNA, 21 nt, Artificial Sequence
  siRNA sense strand against APCS
ugaucauguaaacuugaucac

SEQ ID NO: 161 - RNA, 21 nt, Artificial Sequence
  siRNA sense strand against APCS
gaucauguaaacuugaucaca

SEQ ID NO: 162 - RNA, 21 nt, Artificial Sequence
  siRNA sense strand against APCS
ucauguaaacuugaucacacc

SEQ ID NO: 163 - RNA, 21 nt, Artificial Sequence
  siRNA sense strand against APCS
cauguaaacuugaucacaccg

SEQ ID NO: 164 - RNA, 21 nt, Artificial Sequence
  siRNA sense strand against APCS
uaaacuugaucacaccgcugg

SEQ ID NO: 165 - RNA, 21 nt, Artificial Sequence
  siRNA sense strand against APCS
aaacuugaucacaccgcugga

SEQ ID NO: 166 - RNA, 21 nt, Artificial Sequence
  siRNA sense strand against APCS
acuugaucacaccgcuggaga

SEQ ID NO: 167 - RNA, 21 nt, Artificial Sequence
  siRNA sense strand against APCS
uugaucacaccgcuggagaag

SEQ ID NO: 168 - RNA, 21 nt, Artificial Sequence
  siRNA sense strand against APCS
ugaucacaccgcuggagaagc

SEQ ID NO: 169 - RNA, 21 nt, Artificial Sequence
  siRNA sense strand against APCS
gaucacaccgcuggagaagcc

SEQ ID NO: 170 - RNA, 21 nt, Artificial Sequence
  siRNA sense strand against APCS
cacaccgcuggagaagccucu

SEQ ID NO: 171 - RNA, 21 nt, Artificial Sequence
  siRNA sense strand against APCS
acaccgcuggagaagccucua

SEQ ID NO: 172 - RNA, 21 nt, Artificial Sequence
  siRNA sense strand against APCS
caccgcuggagaagccucuac

SEQ ID NO: 173 - RNA, 21 nt, Artificial Sequence
  siRNA sense strand against APCS
accgcuggagaagccucuaca

SEQ ID NO: 174 - RNA, 21 nt, Artificial Sequence
  siRNA sense strand against APCS
ccgcuggagaagccucuacag

SEQ ID NO: 175 - RNA, 21 nt, Artificial Sequence
  siRNA sense strand against APCS
cgcuggagaagccucuacaga

SEQ ID NO: 176 - RNA, 21 nt, Artificial Sequence
  siRNA sense strand against APCS
gcuggagaagccucuacagaa

SEQ ID NO: 177 - RNA, 21 nt, Artificial Sequence
  siRNA sense strand against APCS
cuggagaagccucuacagaac

SEQ ID NO: 178 - RNA, 21 nt, Artificial Sequence
  siRNA sense strand against APCS
uggagaagccucuacagaacu

SEQ ID NO: 179 - RNA, 21 nt, Artificial Sequence
  siRNA sense strand against APCS
ggagaagccucuacagaacuu

SEQ ID NO: 180 - RNA, 21 nt, Artificial Sequence
  siRNA sense strand against APCS
gagaagccucuacagaacuuu

SEQ ID NO: 181 - RNA, 21 nt, Artificial Sequence
  siRNA sense strand against APCS
agaagccucuacagaacuuua

SEQ ID NO: 182 - RNA, 21 nt, Artificial Sequence
  siRNA sense strand against APCS
gaagccucuacagaacuuuac

SEQ ID NO: 183 - RNA, 21 nt, Artificial Sequence
  siRNA sense strand against APCS
aagccucuacagaacuuuacc

SEQ ID NO: 184 - RNA, 21 nt, Artificial Sequence
  siRNA sense strand against APCS
agccucuacagaacuuuaccu

SEQ ID NO: 185 - RNA, 21 nt, Artificial Sequence
  siRNA sense strand against APCS
gccucuacagaacuuuaccuu

SEQ ID NO: 186 - RNA, 21 nt, Artificial Sequence
  siRNA sense strand against APCS
ccucuacagaacuuuaccuug

SEQ ID NO: 187 - RNA, 21 nt, Artificial Sequence
  siRNA sense strand against APCS
cucuacagaacuuuaccuugu

SEQ ID NO: 188 - RNA, 21 nt, Artificial Sequence
  siRNA sense strand against APCS
ucuacagaacuuuaccuugug

SEQ ID NO: 189 - RNA, 21 nt, Artificial Sequence
  siRNA sense strand against APCS
cuacagaacuuuaccuugugu

SEQ ID NO: 190 - RNA, 21 nt, Artificial Sequence
  siRNA sense strand against APCS
uacagaacuuuaccuuguguu

SEQ ID NO: 191 - RNA, 21 nt, Artificial Sequence
  siRNA sense strand against APCS
acagaacuuuaccuuguguuu

SEQ ID NO: 192 - RNA, 21 nt, Artificial Sequence
  siRNA sense strand against APCS
cagaacuuuaccuuguguuuu

SEQ ID NO: 193 - RNA, 21 nt, Artificial Sequence
  siRNA sense strand against APCS
agaacuuuaccuuguguuuuc

SEQ ID NO: 194 - RNA, 21 nt, Artificial Sequence
  siRNA sense strand against APCS
gaacuuuaccuuguguuuucg

SEQ ID NO: 195 - RNA, 21 nt, Artificial Sequence
  siRNA sense strand against APCS
aacuuuaccuuguguuuucga

SEQ ID NO: 196 - RNA, 21 nt, Artificial Sequence
  siRNA sense strand against APCS
cuuuaccuuguguuuucgagc

SEQ ID NO: 197 - RNA, 21 nt, Artificial Sequence
  siRNA sense strand against APCS
accuuguguuuucgagccuau

SEQ ID NO: 198 - RNA, 21 nt, Artificial Sequence
  siRNA sense strand against APCS
ccuuguguuuucgagccuaua

SEQ ID NO: 199 - RNA, 21 nt, Artificial Sequence
  siRNA sense strand against APCS
cuuguguuuucgagccuauag

SEQ ID NO: 200 - RNA, 21 nt, Artificial Sequence
  siRNA sense strand against APCS
uuguguuuucgagccuauagu

SEQ ID NO: 201 - RNA, 21 nt, Artificial Sequence
  siRNA sense strand against APCS
guguuuucgagccuauaguga

SEQ ID NO: 202 - RNA, 21 nt, Artificial Sequence
  siRNA sense strand against APCS
guuuucgagccuauagugauc

SEQ ID NO: 203 - RNA, 21 nt, Artificial Sequence
  siRNA sense strand against APCS
uuuucgagccuauagugaucu

SEQ ID NO: 204 - RNA, 21 nt, Artificial Sequence
  siRNA sense strand against APCS
cgagccuauagugaucucucu

SEQ ID NO: 205 - RNA, 21 nt, Artificial Sequence
  siRNA sense strand against APCS
gagccuauagugaucucucuc

SEQ ID NO: 206 - RNA, 21 nt, Artificial Sequence
  siRNA sense strand against APCS
agccuauagugaucucucucg

SEQ ID NO: 207 - RNA, 21 nt, Artificial Sequence
  siRNA sense strand against APCS
gccuauagugaucucucucgu

SEQ ID NO: 208 - RNA, 21 nt, Artificial Sequence
  siRNA sense strand against APCS
ccuauagugaucucucucgug

SEQ ID NO: 209 - RNA, 21 nt, Artificial Sequence
  siRNA sense strand against APCS
cuauagugaucucucucgugc

SEQ ID NO: 210 - RNA, 21 nt, Artificial Sequence
  siRNA sense strand against APCS
uauagugaucucucucgugcc

SEQ ID NO: 211 - RNA, 21 nt, Artificial Sequence
  siRNA sense strand against APCS
agugaucucucucgugccuac

SEQ ID NO: 212 - RNA, 21 nt, Artificial Sequence
  siRNA sense strand against APCS
gugaucucucucgugccuaca

SEQ ID NO: 213 - RNA, 21 nt, Artificial Sequence
  siRNA sense strand against APCS
ugaucucucucgugccuacag

SEQ ID NO: 214 - RNA, 21 nt, Artificial Sequence
  siRNA sense strand against APCS
gaucucucucgugccuacagc

SEQ ID NO: 215 - RNA, 21 nt, Artificial Sequence
  siRNA sense strand against APCS
cucucgugccuacagccucuu

SEQ ID NO: 216 - RNA, 21 nt, Artificial Sequence
  siRNA sense strand against APCS
ucucgugccuacagccucuuc

SEQ ID NO: 217 - RNA, 21 nt, Artificial Sequence
  siRNA sense strand against APCS
cucgugccuacagccucuucu

SEQ ID NO: 218 - RNA, 21 nt, Artificial Sequence
  siRNA sense strand against APCS
cgugccuacagccucuucucc

SEQ ID NO: 219 - RNA, 21 nt, Artificial Sequence
  siRNA sense strand against APCS
gugccuacagccucuucuccu

SEQ ID NO: 220 - RNA, 21 nt, Artificial Sequence
  siRNA sense strand against APCS
gccuacagccucuucuccuac

SEQ ID NO: 221 - RNA, 21 nt, Artificial Sequence
  siRNA sense strand against APCS
ccuacagccucuucuccuaca

SEQ ID NO: 222 - RNA, 21 nt, Artificial Sequence
  siRNA sense strand against APCS
cuacagccucuucuccuacaa

SEQ ID NO: 223 - RNA, 21 nt, Artificial Sequence
  siRNA sense strand against APCS
uacagccucuucuccuacaau

SEQ ID NO: 224 - RNA, 21 nt, Artificial Sequence
  siRNA sense strand against APCS
acagccucuucuccuacaaua

SEQ ID NO: 225 - RNA, 21 nt, Artificial Sequence
  siRNA sense strand against APCS
cagccucuucuccuacaauac

SEQ ID NO: 226 - RNA, 21 nt, Artificial Sequence
  siRNA sense strand against APCS
agccucuucuccuacaauacc

SEQ ID NO: 227 - RNA, 21 nt, Artificial Sequence
  siRNA sense strand against APCS
gccucuucuccuacaauaccc

SEQ ID NO: 228 - RNA, 21 nt, Artificial Sequence
  siRNA sense strand against APCS
ccucuucuccuacaauaccca

SEQ ID NO: 229 - RNA, 21 nt, Artificial Sequence
  siRNA sense strand against APCS
ucuucuccuacaauacccaag

SEQ ID NO: 230 - RNA, 21 nt, Artificial Sequence
  siRNA sense strand against APCS
ucuccuacaauacccaaggca

SEQ ID NO: 231 - RNA, 21 nt, Artificial Sequence
  siRNA sense strand against APCS
cuccuacaauacccaaggcag

SEQ ID NO: 232 - RNA, 21 nt, Artificial Sequence
  siRNA sense strand against APCS
uccuacaauacccaaggcagg

SEQ ID NO: 233 - RNA, 21 nt, Artificial Sequence
  siRNA sense strand against APCS
ccuacaauacccaaggcaggg

SEQ ID NO: 234 - RNA, 21 nt, Artificial Sequence
  siRNA sense strand against APCS
cuacaauacccaaggcaggga

SEQ ID NO: 235 - RNA, 21 nt, Artificial Sequence
  siRNA sense strand against APCS
caauacccaaggcagggauaa

SEQ ID NO: 236 - RNA, 21 nt, Artificial Sequence
  siRNA sense strand against APCS
auacccaaggcagggauaaug

SEQ ID NO: 237 - RNA, 21 nt, Artificial Sequence
  siRNA sense strand against APCS
uacccaaggcagggauaauga

SEQ ID NO: 238 - RNA, 21 nt, Artificial Sequence
  siRNA sense strand against APCS
ccaaggcagggauaaugagcu

SEQ ID NO: 239 - RNA, 21 nt, Artificial Sequence
  siRNA sense strand against APCS
aaggcagggauaaugagcuac

SEQ ID NO: 240 - RNA, 21 nt, Artificial Sequence
  siRNA sense strand against APCS
aggcagggauaaugagcuacu

SEQ ID NO: 241 - RNA, 21 nt, Artificial Sequence
  siRNA sense strand against APCS
gcagggauaaugagcuacuag

SEQ ID NO: 242 - RNA, 21 nt, Artificial Sequence
  siRNA sense strand against APCS
cagggauaaugagcuacuagu

SEQ ID NO: 243 - RNA, 21 nt, Artificial Sequence
  siRNA sense strand against APCS
agggauaaugagcuacuaguu

SEQ ID NO: 244 - RNA, 21 nt, Artificial Sequence
  siRNA sense strand against APCS
gggauaaugagcuacuaguuu

SEQ ID NO: 245 - RNA, 21 nt, Artificial Sequence
  siRNA sense strand against APCS
ggauaaugagcuacuaguuua

SEQ ID NO: 246 - RNA, 21 nt, Artificial Sequence
  siRNA sense strand against APCS
gauaaugagcuacuaguuuau

SEQ ID NO: 247 - RNA, 21 nt, Artificial Sequence
  siRNA sense strand against APCS
auaaugagcuacuaguuuaua

SEQ ID NO: 248 - RNA, 21 nt, Artificial Sequence
  siRNA sense strand against APCS
uaaugagcuacuaguuuauaa

SEQ ID NO: 249 - RNA, 21 nt, Artificial Sequence
  siRNA sense strand against APCS
augagcuacuaguuuauaaag

SEQ ID NO: 250 - RNA, 21 nt, Artificial Sequence
  siRNA sense strand against APCS
ugagcuacuaguuuauaaaga

SEQ ID NO: 251 - RNA, 21 nt, Artificial Sequence
  siRNA sense strand against APCS
gagcuacuaguuuauaaagaa

SEQ ID NO: 252 - RNA, 21 nt, Artificial Sequence
  siRNA sense strand against APCS
agcuacuaguuuauaaagaaa

SEQ ID NO: 253 - RNA, 21 nt, Artificial Sequence
  siRNA sense strand against APCS
gcuacuaguuuauaaagaaag

SEQ ID NO: 254 - RNA, 21 nt, Artificial Sequence
  siRNA sense strand against APCS
cuacuaguuuauaaagaaaga

SEQ ID NO: 255 - RNA, 21 nt, Artificial Sequence
  siRNA sense strand against APCS
aguuuauaaagaaagaguugg

SEQ ID NO: 256 - RNA, 21 nt, Artificial Sequence
  siRNA sense strand against APCS
aagaaagaguuggagaguaua

SEQ ID NO: 257 - RNA, 21 nt, Artificial Sequence
  siRNA sense strand against APCS
agaaagaguuggagaguauag

SEQ ID NO: 258 - RNA, 21 nt, Artificial Sequence
  siRNA sense strand against APCS
gaaagaguuggagaguauagu

SEQ ID NO: 259 - RNA, 21 nt, Artificial Sequence
  siRNA sense strand against APCS
aagaguuggagaguauagucu

SEQ ID NO: 260 - RNA, 21 nt, Artificial Sequence
  siRNA sense strand against APCS
agaguuggagaguauagucua

SEQ ID NO: 261 - RNA, 21 nt, Artificial Sequence
  siRNA sense strand against APCS
gaguuggagaguauagucuau

SEQ ID NO: 262 - RNA, 21 nt, Artificial Sequence
  siRNA sense strand against APCS
aguuggagaguauagucuaua

SEQ ID NO: 263 - RNA, 21 nt, Artificial Sequence
  siRNA sense strand against APCS
guuggagaguauagucuauac

SEQ ID NO: 264 - RNA, 21 nt, Artificial Sequence
  siRNA sense strand against APCS
uuggagaguauagucuauaca

SEQ ID NO: 265 - RNA, 21 nt, Artificial Sequence
  siRNA sense strand against APCS
uggagaguauagucuauacau

SEQ ID NO: 266 - RNA, 21 nt, Artificial Sequence
  siRNA sense strand against APCS
ggagaguauagucuauacauu

SEQ ID NO: 267 - RNA, 21 nt, Artificial Sequence
  siRNA sense strand against APCS
gagaguauagucuauacauug

SEQ ID NO: 268 - RNA, 21 nt, Artificial Sequence
  siRNA sense strand against APCS
agaguauagucuauacauugg

SEQ ID NO: 269 - RNA, 21 nt, Artificial Sequence
  siRNA sense strand against APCS
gaguauagucuauacauugga

SEQ ID NO: 270 - RNA, 21 nt, Artificial Sequence
  siRNA sense strand against APCS
aguauagucuauacauuggaa

SEQ ID NO: 271 - RNA, 21 nt, Artificial Sequence
  siRNA sense strand against APCS
guauagucuauacauuggaag

SEQ ID NO: 272 - RNA, 21 nt, Artificial Sequence
  siRNA sense strand against APCS
gucuauacauuggaagacaca

SEQ ID NO: 273 - RNA, 21 nt, Artificial Sequence
  siRNA sense strand against APCS
cuauacauuggaagacacaaa

SEQ ID NO: 274 - RNA, 21 nt, Artificial Sequence
  siRNA sense strand against APCS
uauacauuggaagacacaaag

SEQ ID NO: 275 - RNA, 21 nt, Artificial Sequence
  siRNA sense strand against APCS
auacauuggaagacacaaagu

SEQ ID NO: 276 - RNA, 21 nt, Artificial Sequence
  siRNA sense strand against APCS
acauuggaagacacaaaguua

SEQ ID NO: 277 - RNA, 21 nt, Artificial Sequence
  siRNA sense strand against APCS
cauuggaagacacaaaguuac

SEQ ID NO: 278 - RNA, 21 nt, Artificial Sequence
  siRNA sense strand against APCS
auuggaagacacaaaguuaca

SEQ ID NO: 279 - RNA, 21 nt, Artificial Sequence
  siRNA sense strand against APCS
uggaagacacaaaguuacauc

SEQ ID NO: 280 - RNA, 21 nt, Artificial Sequence
  siRNA sense strand against APCS
ggaagacacaaaguuacaucc

SEQ ID NO: 281 - RNA, 21 nt, Artificial Sequence
  siRNA sense strand against APCS
gaagacacaaaguuacaucca

SEQ ID NO: 282 - RNA, 21 nt, Artificial Sequence
  siRNA sense strand against APCS
aagacacaaaguuacauccaa

SEQ ID NO: 283 - RNA, 21 nt, Artificial Sequence
  siRNA sense strand against APCS
agacacaaaguuacauccaaa

SEQ ID NO: 284 - RNA, 21 nt, Artificial Sequence
  siRNA sense strand against APCS
gacacaaaguuacauccaaag

SEQ ID NO: 285 - RNA, 21 nt, Artificial Sequence
  siRNA sense strand against APCS
acacaaaguuacauccaaagu

SEQ ID NO: 286 - RNA, 21 nt, Artificial Sequence
  siRNA sense strand against APCS
cacaaaguuacauccaaaguu

SEQ ID NO: 287 - RNA, 21 nt, Artificial Sequence
  siRNA sense strand against APCS
caaaguuacauccaaaguuau

SEQ ID NO: 288 - RNA, 21 nt, Artificial Sequence
  siRNA sense strand against APCS
aaaguuacauccaaaguuauc

SEQ ID NO: 289 - RNA, 21 nt, Artificial Sequence
  siRNA sense strand against APCS
aaguuacauccaaaguuaucg

SEQ ID NO: 290 - RNA, 21 nt, Artificial Sequence
  siRNA sense strand against APCS
aguuacauccaaaguuaucga

SEQ ID NO: 291 - RNA, 21 nt, Artificial Sequence
  siRNA sense strand against APCS
guuacauccaaaguuaucgaa

SEQ ID NO: 292 - RNA, 21 nt, Artificial Sequence
  siRNA sense strand against APCS
uuacauccaaaguuaucgaaa

SEQ ID NO: 293 - RNA, 21 nt, Artificial Sequence
  siRNA sense strand against APCS
uacauccaaaguuaucgaaaa

SEQ ID NO: 294 - RNA, 21 nt, Artificial Sequence
  siRNA sense strand against APCS
acauccaaaguuaucgaaaag

SEQ ID NO: 295 - RNA, 21 nt, Artificial Sequence
  siRNA sense strand against APCS
cauccaaaguuaucgaaaagu

SEQ ID NO: 296 - RNA, 21 nt, Artificial Sequence
  siRNA sense strand against APCS
auccaaaguuaucgaaaaguu

SEQ ID NO: 297 - RNA, 21 nt, Artificial Sequence
  siRNA sense strand against APCS
uccaaaguuaucgaaaaguuc

SEQ ID NO: 298 - RNA, 21 nt, Artificial Sequence
  siRNA sense strand against APCS
ccaaaguuaucgaaaaguucc

SEQ ID NO: 299 - RNA, 21 nt, Artificial Sequence
  siRNA sense strand against APCS
caaaguuaucgaaaaguuccc

SEQ ID NO: 300 - RNA, 21 nt, Artificial Sequence
  siRNA sense strand against APCS
cgaaaaguucccggcuccagu

SEQ ID NO: 301 - RNA, 21 nt, Artificial Sequence
  siRNA sense strand against APCS
aaaaguucccggcuccagugc

SEQ ID NO: 302 - RNA, 21 nt, Artificial Sequence
  siRNA sense strand against APCS
cccggcuccagugcacaucug

SEQ ID NO: 303 - RNA, 21 nt, Artificial Sequence
  siRNA sense strand against APCS
cggcuccagugcacaucugug

SEQ ID NO: 304 - RNA, 21 nt, Artificial Sequence
  siRNA sense strand against APCS
ggcuccagugcacaucugugu

SEQ ID NO: 305 - RNA, 21 nt, Artificial Sequence
  siRNA sense strand against APCS
gcuccagugcacaucugugug

SEQ ID NO: 306 - RNA, 21 nt, Artificial Sequence
  siRNA sense strand against APCS
cuccagugcacaucuguguga

SEQ ID NO: 307 - RNA, 21 nt, Artificial Sequence
  siRNA sense strand against APCS
ccagugcacaucugugugagc

SEQ ID NO: 308 - RNA, 21 nt, Artificial Sequence
  siRNA sense strand against APCS
gugcacaucugugugagcugg

SEQ ID NO: 309 - RNA, 21 nt, Artificial Sequence
  siRNA sense strand against APCS
gcacaucugugugagcuggga

SEQ ID NO: 310 - RNA, 21 nt, Artificial Sequence
  siRNA sense strand against APCS
acaucugugugagcugggagu

SEQ ID NO: 311 - RNA, 21 nt, Artificial Sequence
  siRNA sense strand against APCS
aucugugugagcugggagucc

SEQ ID NO: 312 - RNA, 21 nt, Artificial Sequence
  siRNA sense strand against APCS
ugugugagcugggaguccuca

SEQ ID NO: 313 - RNA, 21 nt, Artificial Sequence
  siRNA sense strand against APCS
gugugagcugggaguccucau

SEQ ID NO: 314 - RNA, 21 nt, Artificial Sequence
  siRNA sense strand against APCS
agcugggaguccucaucaggu

SEQ ID NO: 315 - RNA, 21 nt, Artificial Sequence
  siRNA sense strand against APCS
gcugggaguccucaucaggua

SEQ ID NO: 316 - RNA, 21 nt, Artificial Sequence
  siRNA sense strand against APCS
cugggaguccucaucagguau

SEQ ID NO: 317 - RNA, 21 nt, Artificial Sequence
  siRNA sense strand against APCS
ugggaguccucaucagguauu

SEQ ID NO: 318 - RNA, 21 nt, Artificial Sequence
  siRNA sense strand against APCS
gggaguccucaucagguauug

SEQ ID NO: 319 - RNA, 21 nt, Artificial Sequence
  siRNA sense strand against APCS
ggaguccucaucagguauugc

SEQ ID NO: 320 - RNA, 21 nt, Artificial Sequence
  siRNA sense strand against APCS
gaguccucaucagguauugcu

SEQ ID NO: 321 - RNA, 21 nt, Artificial Sequence
  siRNA sense strand against APCS
guccucaucagguauugcuga

SEQ ID NO: 322 - RNA, 21 nt, Artificial Sequence
  siRNA sense strand against APCS
uccucaucagguauugcugaa

SEQ ID NO: 323 - RNA, 21 nt, Artificial Sequence
  siRNA sense strand against APCS
ccucaucagguauugcugaau

SEQ ID NO: 324 - RNA, 21 nt, Artificial Sequence
  siRNA sense strand against APCS
cucaucagguauugcugaauu

SEQ ID NO: 325 - RNA, 21 nt, Artificial Sequence
  siRNA sense strand against APCS
ucaucagguauugcugaauuu

SEQ ID NO: 326 - RNA, 21 nt, Artificial Sequence
  siRNA sense strand against APCS
caucagguauugcugaauuuu

SEQ ID NO: 327 - RNA, 21 nt, Artificial Sequence
  siRNA sense strand against APCS
aucagguauugcugaauuuug

SEQ ID NO: 328 - RNA, 21 nt, Artificial Sequence
  siRNA sense strand against APCS
ucagguauugcugaauuuugg

SEQ ID NO: 329 - RNA, 21 nt, Artificial Sequence
  siRNA sense strand against APCS
cagguauugcugaauuuugga

SEQ ID NO: 330 - RNA, 21 nt, Artificial Sequence
  siRNA sense strand against APCS
agguauugcugaauuuuggau

SEQ ID NO: 331 - RNA, 21 nt, Artificial Sequence
  siRNA sense strand against APCS
gguauugcugaauuuuggauc

SEQ ID NO: 332 - RNA, 21 nt, Artificial Sequence
  siRNA sense strand against APCS
guauugcugaauuuuggauca

SEQ ID NO: 333 - RNA, 21 nt, Artificial Sequence
  siRNA sense strand against APCS
auugcugaauuuuggaucaau

SEQ ID NO: 334 - RNA, 21 nt, Artificial Sequence
  siRNA sense strand against APCS
ugcugaauuuuggaucaaugg

SEQ ID NO: 335 - RNA, 21 nt, Artificial Sequence
  siRNA sense strand against APCS
gcugaauuuuggaucaauggg

SEQ ID NO: 336 - RNA, 21 nt, Artificial Sequence
  siRNA sense strand against APCS
cugaauuuuggaucaauggga

SEQ ID NO: 337 - RNA, 21 nt, Artificial Sequence
  siRNA sense strand against APCS
gaauuuuggaucaaugggaca

SEQ ID NO: 338 - RNA, 21 nt, Artificial Sequence
  siRNA sense strand against APCS
ggaucaaugggacaccuuugg

SEQ ID NO: 339 - RNA, 21 nt, Artificial Sequence
  siRNA sense strand against APCS
caaugggacaccuuuggugaa

SEQ ID NO: 340 - RNA, 21 nt, Artificial Sequence
  siRNA sense strand against APCS
aaugggacaccuuuggugaaa

SEQ ID NO: 341 - RNA, 21 nt, Artificial Sequence
  siRNA sense strand against APCS
augggacaccuuuggugaaaa

SEQ ID NO: 342 - RNA, 21 nt, Artificial Sequence
  siRNA sense strand against APCS
ugggacaccuuuggugaaaaa

SEQ ID NO: 343 - RNA, 21 nt, Artificial Sequence
  siRNA sense strand against APCS
gggacaccuuuggugaaaaag

SEQ ID NO: 344 - RNA, 21 nt, Artificial Sequence
  siRNA sense strand against APCS
ggacaccuuuggugaaaaagg

SEQ ID NO: 345 - RNA, 21 nt, Artificial Sequence
  siRNA sense strand against APCS
accuuuggugaaaaagggucu

SEQ ID NO: 346 - RNA, 21 nt, Artificial Sequence
  siRNA sense strand against APCS
ccuuuggugaaaaagggucug

SEQ ID NO: 347 - RNA, 21 nt, Artificial Sequence
  siRNA sense strand against APCS
cuuuggugaaaaagggucugc

SEQ ID NO: 348 - RNA, 21 nt, Artificial Sequence
  siRNA sense strand against APCS
ggugaaaaagggucugcgaca

SEQ ID NO: 349 - RNA, 21 nt, Artificial Sequence
  siRNA sense strand against APCS
gugaaaaagggucugcgacag

SEQ ID NO: 350 - RNA, 21 nt, Artificial Sequence
  siRNA sense strand against APCS
ugaaaaagggucugcgacagg

SEQ ID NO: 351 - RNA, 21 nt, Artificial Sequence
  siRNA sense strand against APCS
gaaaaagggucugcgacaggg

SEQ ID NO: 352 - RNA, 21 nt, Artificial Sequence
  siRNA sense strand against APCS
aaagggucugcgacaggguua

SEQ ID NO: 353 - RNA, 21 nt, Artificial Sequence
  siRNA sense strand against APCS
aagggucugcgacaggguuac

SEQ ID NO: 354 - RNA, 21 nt, Artificial Sequence
  siRNA sense strand against APCS
agggucugcgacaggguuacu

SEQ ID NO: 355 - RNA, 21 nt, Artificial Sequence
  siRNA sense strand against APCS
gggucugcgacaggguuacuu

SEQ ID NO: 356 - RNA, 21 nt, Artificial Sequence
  siRNA sense strand against APCS
ggucugcgacaggguuacuuu

SEQ ID NO: 357 - RNA, 21 nt, Artificial Sequence
  siRNA sense strand against APCS
gucugcgacaggguuacuuug

SEQ ID NO: 358 - RNA, 21 nt, Artificial Sequence
  siRNA sense strand against APCS
ucugcgacaggguuacuuugu

SEQ ID NO: 359 - RNA, 21 nt, Artificial Sequence
  siRNA sense strand against APCS
cugcgacaggguuacuuugua

SEQ ID NO: 360 - RNA, 21 nt, Artificial Sequence
  siRNA sense strand against APCS
ugcgacaggguuacuuuguag

SEQ ID NO: 361 - RNA, 21 nt, Artificial Sequence
  siRNA sense strand against APCS
gcgacaggguuacuuuguaga

SEQ ID NO: 362 - RNA, 21 nt, Artificial Sequence
  siRNA sense strand against APCS
cgacaggguuacuuuguagaa

SEQ ID NO: 363 - RNA, 21 nt, Artificial Sequence
  siRNA sense strand against APCS
gacaggguuacuuuguagaag

SEQ ID NO: 364 - RNA, 21 nt, Artificial Sequence
  siRNA sense strand against APCS
acaggguuacuuuguagaagc

SEQ ID NO: 365 - RNA, 21 nt, Artificial Sequence
  siRNA sense strand against APCS
caggguuacuuuguagaagcu

SEQ ID NO: 366 - RNA, 21 nt, Artificial Sequence
  siRNA sense strand against APCS
aggguuacuuuguagaagcuc

SEQ ID NO: 367 - RNA, 21 nt, Artificial Sequence
  siRNA sense strand against APCS
ggguuacuuuguagaagcuca

SEQ ID NO: 368 - RNA, 21 nt, Artificial Sequence
  siRNA sense strand against APCS
gguuacuuuguagaagcucag

SEQ ID NO: 369 - RNA, 21 nt, Artificial Sequence
  siRNA sense strand against APCS
guuacuuuguagaagcucagc

SEQ ID NO: 370 - RNA, 21 nt, Artificial Sequence
  siRNA sense strand against APCS
agaagcucagcccaagauugu

SEQ ID NO: 371 - RNA, 21 nt, Artificial Sequence
  siRNA sense strand against APCS
gaagcucagcccaagauuguc

SEQ ID NO: 372 - RNA, 21 nt, Artificial Sequence
  siRNA sense strand against APCS
aagcucagcccaagauugucc

SEQ ID NO: 373 - RNA, 21 nt, Artificial Sequence
  siRNA sense strand against APCS
agcucagcccaagauuguccu

SEQ ID NO: 374 - RNA, 21 nt, Artificial Sequence
  siRNA sense strand against APCS
cucagcccaagauuguccugg

SEQ ID NO: 375 - RNA, 21 nt, Artificial Sequence
  siRNA sense strand against APCS
agcccaagauuguccuggggc

SEQ ID NO: 376 - RNA, 21 nt, Artificial Sequence
  siRNA sense strand against APCS
ccaagauuguccuggggcagg

SEQ ID NO: 377 - RNA, 21 nt, Artificial Sequence
  siRNA sense strand against APCS
caagauuguccuggggcagga

SEQ ID NO: 378 - RNA, 21 nt, Artificial Sequence
  siRNA sense strand against APCS
agauuguccuggggcaggaac

SEQ ID NO: 379 - RNA, 21 nt, Artificial Sequence
  siRNA sense strand against APCS
gauuguccuggggcaggaaca

SEQ ID NO: 380 - RNA, 21 nt, Artificial Sequence
  siRNA sense strand against APCS
uuguccuggggcaggaacagg

SEQ ID NO: 381 - RNA, 21 nt, Artificial Sequence
  siRNA sense strand against APCS
uccuggggcaggaacaggauu

SEQ ID NO: 382 - RNA, 21 nt, Artificial Sequence
  siRNA sense strand against APCS
cuggggcaggaacaggauucc

SEQ ID NO: 383 - RNA, 21 nt, Artificial Sequence
  siRNA sense strand against APCS
uggggcaggaacaggauuccu

SEQ ID NO: 384 - RNA, 21 nt, Artificial Sequence
  siRNA sense strand against APCS
ggggcaggaacaggauuccua

SEQ ID NO: 385 - RNA, 21 nt, Artificial Sequence
  siRNA sense strand against APCS
ggcaggaacaggauuccuaug

SEQ ID NO: 386 - RNA, 21 nt, Artificial Sequence
  siRNA sense strand against APCS
gcaggaacaggauuccuaugg

SEQ ID NO: 387 - RNA, 21 nt, Artificial Sequence
  siRNA sense strand against APCS
caggaacaggauuccuauggg

SEQ ID NO: 388 - RNA, 21 nt, Artificial Sequence
  siRNA sense strand against APCS
ggaacaggauuccuauggggg

SEQ ID NO: 389 - RNA, 21 nt, Artificial Sequence
  siRNA sense strand against APCS
gaacaggauuccuaugggggc

SEQ ID NO: 390 - RNA, 21 nt, Artificial Sequence
  siRNA sense strand against APCS
acaggauuccuaugggggcaa

SEQ ID NO: 391 - RNA, 21 nt, Artificial Sequence
  siRNA sense strand against APCS
caggauuccuaugggggcaag

SEQ ID NO: 392 - RNA, 21 nt, Artificial Sequence
  siRNA sense strand against APCS
ggauuccuaugggggcaaguu

SEQ ID NO: 393 - RNA, 21 nt, Artificial Sequence
  siRNA sense strand against APCS
gauuccuaugggggcaaguuu

SEQ ID NO: 394 - RNA, 21 nt, Artificial Sequence
  siRNA sense strand against APCS
auuccuaugggggcaaguuug

SEQ ID NO: 395 - RNA, 21 nt, Artificial Sequence
  siRNA sense strand against APCS
uuccuaugggggcaaguuuga

SEQ ID NO: 396 - RNA, 21 nt, Artificial Sequence
  siRNA sense strand against APCS
uccuaugggggcaaguuugau

SEQ ID NO: 397 - RNA, 21 nt, Artificial Sequence
  siRNA sense strand against APCS
ccuaugggggcaaguuugaua

SEQ ID NO: 398 - RNA, 21 nt, Artificial Sequence
  siRNA sense strand against APCS
cuaugggggcaaguuugauag

SEQ ID NO: 399 - RNA, 21 nt, Artificial Sequence
  siRNA sense strand against APCS
uaugggggcaaguuugauagg

SEQ ID NO: 400 - RNA, 21 nt, Artificial Sequence
  siRNA sense strand against APCS
gggggcaaguuugauaggagc

SEQ ID NO: 401 - RNA, 21 nt, Artificial Sequence
  siRNA sense strand against APCS
ggggcaaguuugauaggagcc

SEQ ID NO: 402 - RNA, 21 nt, Artificial Sequence
  siRNA sense strand against APCS
gggcaaguuugauaggagcca

SEQ ID NO: 403 - RNA, 21 nt, Artificial Sequence
  siRNA sense strand against APCS
ggcaaguuugauaggagccag

SEQ ID NO: 404 - RNA, 21 nt, Artificial Sequence
  siRNA sense strand against APCS
gcaaguuugauaggagccagu

SEQ ID NO: 405 - RNA, 21 nt, Artificial Sequence
  siRNA sense strand against APCS
caaguuugauaggagccaguc

SEQ ID NO: 406 - RNA, 21 nt, Artificial Sequence
  siRNA sense strand against APCS
aaguuugauaggagccagucc

SEQ ID NO: 407 - RNA, 21 nt, Artificial Sequence
  siRNA sense strand against APCS
uugauaggagccaguccuuug

SEQ ID NO: 408 - RNA, 21 nt, Artificial Sequence
  siRNA sense strand against APCS
ugauaggagccaguccuuugu

SEQ ID NO: 409 - RNA, 21 nt, Artificial Sequence
  siRNA sense strand against APCS
gauaggagccaguccuuugug

SEQ ID NO: 410 - RNA, 21 nt, Artificial Sequence
  siRNA sense strand against APCS
auaggagccaguccuuugugg

SEQ ID NO: 411 - RNA, 21 nt, Artificial Sequence
  siRNA sense strand against APCS
aggagccaguccuuuguggga

SEQ ID NO: 412 - RNA, 21 nt, Artificial Sequence
  siRNA sense strand against APCS
ggagccaguccuuugugggag

SEQ ID NO: 413 - RNA, 21 nt, Artificial Sequence
  siRNA sense strand against APCS
gagccaguccuuugugggaga

SEQ ID NO: 414 - RNA, 21 nt, Artificial Sequence
  siRNA sense strand against APCS
agccaguccuuugugggagag

SEQ ID NO: 415 - RNA, 21 nt, Artificial Sequence
  siRNA sense strand against APCS
gccaguccuuugugggagaga

SEQ ID NO: 416 - RNA, 21 nt, Artificial Sequence
  siRNA sense strand against APCS
ccaguccuuugugggagagau

SEQ ID NO: 417 - RNA, 21 nt, Artificial Sequence
  siRNA sense strand against APCS
caguccuuugugggagagauu

SEQ ID NO: 418 - RNA, 21 nt, Artificial Sequence
  siRNA sense strand against APCS
aguccuuugugggagagauug

SEQ ID NO: 419 - RNA, 21 nt, Artificial Sequence
  siRNA sense strand against APCS
guccuuugugggagagauugg

SEQ ID NO: 420 - RNA, 21 nt, Artificial Sequence
  siRNA sense strand against APCS
uccuuugugggagagauuggg

SEQ ID NO: 421 - RNA, 21 nt, Artificial Sequence
  siRNA sense strand against APCS
ccuuugugggagagauugggg

SEQ ID NO: 422 - RNA, 21 nt, Artificial Sequence
  siRNA sense strand against APCS
cuuugugggagagauugggga

SEQ ID NO: 423 - RNA, 21 nt, Artificial Sequence
  siRNA sense strand against APCS
uugugggagagauuggggauu

SEQ ID NO: 424 - RNA, 21 nt, Artificial Sequence
  siRNA sense strand against APCS
ugugggagagauuggggauuu

SEQ ID NO: 425 - RNA, 21 nt, Artificial Sequence
  siRNA sense strand against APCS
gugggagagauuggggauuug

SEQ ID NO: 426 - RNA, 21 nt, Artificial Sequence
  siRNA sense strand against APCS
ugggagagauuggggauuugu

SEQ ID NO: 427 - RNA, 21 nt, Artificial Sequence
  siRNA sense strand against APCS
gggagagauuggggauuugua

SEQ ID NO: 428 - RNA, 21 nt, Artificial Sequence
  siRNA sense strand against APCS
ggagagauuggggauuuguac

SEQ ID NO: 429 - RNA, 21 nt, Artificial Sequence
  siRNA sense strand against APCS
gagagauuggggauuuguaca

SEQ ID NO: 430 - RNA, 21 nt, Artificial Sequence
  siRNA sense strand against APCS
agagauuggggauuuguacau

SEQ ID NO: 431 - RNA, 21 nt, Artificial Sequence
  siRNA sense strand against APCS
gagauuggggauuuguacaug

SEQ ID NO: 432 - RNA, 21 nt, Artificial Sequence
  siRNA sense strand against APCS
agauuggggauuuguacaugu

SEQ ID NO: 433 - RNA, 21 nt, Artificial Sequence
  siRNA sense strand against APCS
ggggauuuguacaugugggac

SEQ ID NO: 434 - RNA, 21 nt, Artificial Sequence
  siRNA sense strand against APCS
gggauuuguacaugugggacu

SEQ ID NO: 435 - RNA, 21 nt, Artificial Sequence
  siRNA sense strand against APCS
ggauuuguacaugugggacuc

SEQ ID NO: 436 - RNA, 21 nt, Artificial Sequence
  siRNA sense strand against APCS
gauuuguacaugugggacucu

SEQ ID NO: 437 - RNA, 21 nt, Artificial Sequence
  siRNA sense strand against APCS
uguacaugugggacucugugc

SEQ ID NO: 438 - RNA, 21 nt, Artificial Sequence
  siRNA sense strand against APCS
guacaugugggacucugugcu

SEQ ID NO: 439 - RNA, 21 nt, Artificial Sequence
  siRNA sense strand against APCS
acaugugggacucugugcugc

SEQ ID NO: 440 - RNA, 21 nt, Artificial Sequence
  siRNA sense strand against APCS
gggacucugugcugcccccag

SEQ ID NO: 441 - RNA, 21 nt, Artificial Sequence
  siRNA sense strand against APCS
ggacucugugcugcccccaga

SEQ ID NO: 442 - RNA, 21 nt, Artificial Sequence
  siRNA sense strand against APCS
acucugugcugcccccagaaa

SEQ ID NO: 443 - RNA, 21 nt, Artificial Sequence
  siRNA sense strand against APCS
cucugugcugcccccagaaaa

SEQ ID NO: 444 - RNA, 21 nt, Artificial Sequence
  siRNA sense strand against APCS
cugugcugcccccagaaaaua

SEQ ID NO: 445 - RNA, 21 nt, Artificial Sequence
  siRNA sense strand against APCS
ugugcugcccccagaaaauau

SEQ ID NO: 446 - RNA, 21 nt, Artificial Sequence
  siRNA sense strand against APCS
gugcugcccccagaaaauauc

SEQ ID NO: 447 - RNA, 21 nt, Artificial Sequence
  siRNA sense strand against APCS
gcugcccccagaaaauauccu

SEQ ID NO: 448 - RNA, 21 nt, Artificial Sequence
  siRNA sense strand against APCS
cccccagaaaauauccugucu

SEQ ID NO: 449 - RNA, 21 nt, Artificial Sequence
  siRNA sense strand against APCS
cccagaaaauauccugucugc

SEQ ID NO: 450 - RNA, 21 nt, Artificial Sequence
  siRNA sense strand against APCS
ccagaaaauauccugucugcc

SEQ ID NO: 451 - RNA, 21 nt, Artificial Sequence
  siRNA sense strand against APCS
cagaaaauauccugucugccu

SEQ ID NO: 452 - RNA, 21 nt, Artificial Sequence
  siRNA sense strand against APCS
gaaaauauccugucugccuau

SEQ ID NO: 453 - RNA, 21 nt, Artificial Sequence
  siRNA sense strand against APCS
aaaauauccugucugccuauc

SEQ ID NO: 454 - RNA, 21 nt, Artificial Sequence
  siRNA sense strand against APCS
aaauauccugucugccuauca

SEQ ID NO: 455 - RNA, 21 nt, Artificial Sequence
  siRNA sense strand against APCS
ccugucugccuaucaggguac

SEQ ID NO: 456 - RNA, 21 nt, Artificial Sequence
  siRNA sense strand against APCS
cugucugccuaucaggguacc

SEQ ID NO: 457 - RNA, 21 nt, Artificial Sequence
  siRNA sense strand against APCS
gucugccuaucaggguacccc

SEQ ID NO: 458 - RNA, 21 nt, Artificial Sequence
  siRNA sense strand against APCS
ugccuaucaggguaccccucu

SEQ ID NO: 459 - RNA, 21 nt, Artificial Sequence
  siRNA sense strand against APCS
gccuaucaggguaccccucuc

SEQ ID NO: 460 - RNA, 21 nt, Artificial Sequence
  siRNA sense strand against APCS
ccuaucaggguaccccucucc

SEQ ID NO: 461 - RNA, 21 nt, Artificial Sequence
  siRNA sense strand against APCS
cuaucaggguaccccucuccc

SEQ ID NO: 462 - RNA, 21 nt, Artificial Sequence
  siRNA sense strand against APCS
caggguaccccucucccugcc

SEQ ID NO: 463 - RNA, 21 nt, Artificial Sequence
  siRNA sense strand against APCS
ggguaccccucucccugccaa

SEQ ID NO: 464 - RNA, 21 nt, Artificial Sequence
  siRNA sense strand against APCS
gguaccccucucccugccaau

SEQ ID NO: 465 - RNA, 21 nt, Artificial Sequence
  siRNA sense strand against APCS
guaccccucucccugccaaua

SEQ ID NO: 466 - RNA, 21 nt, Artificial Sequence
  siRNA sense strand against APCS
uaccccucucccugccaauau

SEQ ID NO: 467 - RNA, 21 nt, Artificial Sequence
  siRNA sense strand against APCS
ccccucucccugccaauaucc

SEQ ID NO: 468 - RNA, 21 nt, Artificial Sequence
  siRNA sense strand against APCS
cccucucccugccaauauccu

SEQ ID NO: 469 - RNA, 21 nt, Artificial Sequence
  siRNA sense strand against APCS
cugccaauauccuggacuggc

SEQ ID NO: 470 - RNA, 21 nt, Artificial Sequence
  siRNA sense strand against APCS
ccaauauccuggacuggcagg

SEQ ID NO: 471 - RNA, 21 nt, Artificial Sequence
  siRNA sense strand against APCS
caauauccuggacuggcaggc

SEQ ID NO: 472 - RNA, 21 nt, Artificial Sequence
  siRNA sense strand against APCS
uccuggacuggcaggcucuga

SEQ ID NO: 473 - RNA, 21 nt, Artificial Sequence
  siRNA sense strand against APCS
ccuggacuggcaggcucugaa

SEQ ID NO: 474 - RNA, 21 nt, Artificial Sequence
  siRNA sense strand against APCS
cuggacuggcaggcucugaac

SEQ ID NO: 475 - RNA, 21 nt, Artificial Sequence
  siRNA sense strand against APCS
uggacuggcaggcucugaacu

SEQ ID NO: 476 - RNA, 21 nt, Artificial Sequence
  siRNA sense strand against APCS
ggacuggcaggcucugaacua

SEQ ID NO: 477 - RNA, 21 nt, Artificial Sequence
  siRNA sense strand against APCS
gacuggcaggcucugaacuau

SEQ ID NO: 478 - RNA, 21 nt, Artificial Sequence
  siRNA sense strand against APCS
acuggcaggcucugaacuaug

SEQ ID NO: 479 - RNA, 21 nt, Artificial Sequence
  siRNA sense strand against APCS
cuggcaggcucugaacuauga

SEQ ID NO: 480 - RNA, 21 nt, Artificial Sequence
  siRNA sense strand against APCS
uggcaggcucugaacuaugaa

SEQ ID NO: 481 - RNA, 21 nt, Artificial Sequence
  siRNA sense strand against APCS
ggcaggcucugaacuaugaaa

SEQ ID NO: 482 - RNA, 21 nt, Artificial Sequence
  siRNA sense strand against APCS
gcaggcucugaacuaugaaau

SEQ ID NO: 483 - RNA, 21 nt, Artificial Sequence
  siRNA sense strand against APCS
caggcucugaacuaugaaauc

SEQ ID NO: 484 - RNA, 21 nt, Artificial Sequence
  siRNA sense strand against APCS
aggcucugaacuaugaaauca

SEQ ID NO: 485 - RNA, 21 nt, Artificial Sequence
  siRNA sense strand against APCS
ggcucugaacuaugaaaucag

SEQ ID NO: 486 - RNA, 21 nt, Artificial Sequence
  siRNA sense strand against APCS
gcucugaacuaugaaaucaga

SEQ ID NO: 487 - RNA, 21 nt, Artificial Sequence
  siRNA sense strand against APCS
cucugaacuaugaaaucagag

SEQ ID NO: 488 - RNA, 21 nt, Artificial Sequence
  siRNA sense strand against APCS
ucugaacuaugaaaucagagg

SEQ ID NO: 489 - RNA, 21 nt, Artificial Sequence
  siRNA sense strand against APCS
gaacuaugaaaucagaggaua

SEQ ID NO: 490 - RNA, 21 nt, Artificial Sequence
  siRNA sense strand against APCS
aacuaugaaaucagaggauau

SEQ ID NO: 491 - RNA, 21 nt, Artificial Sequence
  siRNA sense strand against APCS
acuaugaaaucagaggauaug

SEQ ID NO: 492 - RNA, 21 nt, Artificial Sequence
  siRNA sense strand against APCS
cuaugaaaucagaggauaugu

SEQ ID NO: 493 - RNA, 21 nt, Artificial Sequence
  siRNA sense strand against APCS
uaugaaaucagaggauauguc

SEQ ID NO: 494 - RNA, 21 nt, Artificial Sequence
  siRNA sense strand against APCS
ugaaaucagaggauaugucau

SEQ ID NO: 495 - RNA, 21 nt, Artificial Sequence
  siRNA sense strand against APCS
gaaaucagaggauaugucauc

SEQ ID NO: 496 - RNA, 21 nt, Artificial Sequence
  siRNA sense strand against APCS
aaaucagaggauaugucauca

SEQ ID NO: 497 - RNA, 21 nt, Artificial Sequence
  siRNA sense strand against APCS
aaucagaggauaugucaucau

SEQ ID NO: 498 - RNA, 21 nt, Artificial Sequence
  siRNA sense strand against APCS
cagaggauaugucaucaucaa

SEQ ID NO: 499 - RNA, 21 nt, Artificial Sequence
  siRNA sense strand against APCS
agaggauaugucaucaucaaa

SEQ ID NO: 500 - RNA, 21 nt, Artificial Sequence
  siRNA sense strand against APCS
gaggauaugucaucaucaaac

SEQ ID NO: 501 - RNA, 21 nt, Artificial Sequence
  siRNA sense strand against APCS
aggauaugucaucaucaaacc

SEQ ID NO: 502 - RNA, 21 nt, Artificial Sequence
  siRNA sense strand against APCS
ggauaugucaucaucaaaccc

SEQ ID NO: 503 - RNA, 21 nt, Artificial Sequence
  siRNA sense strand against APCS
gauaugucaucaucaaacccu

SEQ ID NO: 504 - RNA, 21 nt, Artificial Sequence
  siRNA sense strand against APCS
augucaucaucaaacccuugg

SEQ ID NO: 505 - RNA, 21 nt, Artificial Sequence
  siRNA sense strand against APCS
caucaucaaacccuuggugug

SEQ ID NO: 506 - RNA, 21 nt, Artificial Sequence
  siRNA sense strand against APCS
ucaucaaacccuugguguggg

SEQ ID NO: 507 - RNA, 21 nt, Artificial Sequence
  siRNA sense strand against APCS
acccuuggugugggucugagg

SEQ ID NO: 508 - RNA, 21 nt, Artificial Sequence
  siRNA sense strand against APCS
cccuuggugugggucugaggu

SEQ ID NO: 509 - RNA, 21 nt, Artificial Sequence
  siRNA sense strand against APCS
ccuuggugugggucugagguc

SEQ ID NO: 510 - RNA, 21 nt, Artificial Sequence
  siRNA sense strand against APCS
cuuggugugggucugaggucu

SEQ ID NO: 511 - RNA, 21 nt, Artificial Sequence
  siRNA sense strand against APCS
uggugugggucugaggucuug

SEQ ID NO: 512 - RNA, 21 nt, Artificial Sequence
  siRNA sense strand against APCS
ggugugggucugaggucuuga

SEQ ID NO: 513 - RNA, 21 nt, Artificial Sequence
  siRNA sense strand against APCS
gugugggucugaggucuugac

SEQ ID NO: 514 - RNA, 21 nt, Artificial Sequence
  siRNA sense strand against APCS
ugugggucugaggucuugacu

SEQ ID NO: 515 - RNA, 21 nt, Artificial Sequence
  siRNA sense strand against APCS
gugggucugaggucuugacuc

SEQ ID NO: 516 - RNA, 21 nt, Artificial Sequence
  siRNA sense strand against APCS
gggucugaggucuugacucaa

SEQ ID NO: 517 - RNA, 21 nt, Artificial Sequence
  siRNA sense strand against APCS
ggucugaggucuugacucaac

SEQ ID NO: 518 - RNA, 21 nt, Artificial Sequence
  siRNA sense strand against APCS
gucugaggucuugacucaacg

SEQ ID NO: 519 - RNA, 21 nt, Artificial Sequence
  siRNA sense strand against APCS
cugaggucuugacucaacgag

SEQ ID NO: 520 - RNA, 21 nt, Artificial Sequence
  siRNA sense strand against APCS
ugaggucuugacucaacgaga

SEQ ID NO: 521 - RNA, 21 nt, Artificial Sequence
  siRNA sense strand against APCS
gaggucuugacucaacgagag

SEQ ID NO: 522 - RNA, 21 nt, Artificial Sequence
  siRNA sense strand against APCS
aggucuugacucaacgagagc

SEQ ID NO: 523 - RNA, 21 nt, Artificial Sequence
  siRNA sense strand against APCS
ggucuugacucaacgagagca

SEQ ID NO: 524 - RNA, 21 nt, Artificial Sequence
  siRNA sense strand against APCS
gucuugacucaacgagagcac

SEQ ID NO: 525 - RNA, 21 nt, Artificial Sequence
  siRNA sense strand against APCS
ucuugacucaacgagagcacu

SEQ ID NO: 526 - RNA, 21 nt, Artificial Sequence
  siRNA sense strand against APCS
cuugacucaacgagagcacuu

SEQ ID NO: 527 - RNA, 21 nt, Artificial Sequence
  siRNA sense strand against APCS
uugacucaacgagagcacuug

SEQ ID NO: 528 - RNA, 21 nt, Artificial Sequence
  siRNA sense strand against APCS
ugacucaacgagagcacuuga

SEQ ID NO: 529 - RNA, 21 nt, Artificial Sequence
  siRNA sense strand against APCS
gacucaacgagagcacuugaa

SEQ ID NO: 530 - RNA, 21 nt, Artificial Sequence
  siRNA sense strand against APCS
acucaacgagagcacuugaaa

SEQ ID NO: 531 - RNA, 21 nt, Artificial Sequence
  siRNA sense strand against APCS
cucaacgagagcacuugaaaa

SEQ ID NO: 532 - RNA, 21 nt, Artificial Sequence
  siRNA sense strand against APCS
ucaacgagagcacuugaaaau

SEQ ID NO: 533 - RNA, 21 nt, Artificial Sequence
  siRNA sense strand against APCS
caacgagagcacuugaaaaug

SEQ ID NO: 534 - RNA, 21 nt, Artificial Sequence
  siRNA sense strand against APCS
aacgagagcacuugaaaauga

SEQ ID NO: 535 - RNA, 21 nt, Artificial Sequence
  siRNA sense strand against APCS
acgagagcacuugaaaaugaa

SEQ ID NO: 536 - RNA, 21 nt, Artificial Sequence
  siRNA sense strand against APCS
cgagagcacuugaaaaugaaa

SEQ ID NO: 537 - RNA, 21 nt, Artificial Sequence
  siRNA sense strand against APCS
gagagcacuugaaaaugaaau

SEQ ID NO: 538 - RNA, 21 nt, Artificial Sequence
  siRNA sense strand against APCS
agagcacuugaaaaugaaaug

SEQ ID NO: 539 - RNA, 21 nt, Artificial Sequence
  siRNA sense strand against APCS
gagcacuugaaaaugaaauga

SEQ ID NO: 540 - RNA, 21 nt, Artificial Sequence
  siRNA sense strand against APCS
agcacuugaaaaugaaaugac

SEQ ID NO: 541 - RNA, 21 nt, Artificial Sequence
  siRNA sense strand against APCS
gcacuugaaaaugaaaugacu

SEQ ID NO: 542 - RNA, 21 nt, Artificial Sequence
  siRNA sense strand against APCS
cacuugaaaaugaaaugacug

SEQ ID NO: 543 - RNA, 21 nt, Artificial Sequence
  siRNA sense strand against APCS
acuugaaaaugaaaugacugu

SEQ ID NO: 544 - RNA, 21 nt, Artificial Sequence
  siRNA sense strand against APCS
cuugaaaaugaaaugacuguc

SEQ ID NO: 545 - RNA, 21 nt, Artificial Sequence
  siRNA sense strand against APCS
uugaaaaugaaaugacugucu

SEQ ID NO: 546 - RNA, 21 nt, Artificial Sequence
  siRNA sense strand against APCS
ugaaaaugaaaugacugucua

SEQ ID NO: 547 - RNA, 21 nt, Artificial Sequence
  siRNA sense strand against APCS
gaaaaugaaaugacugucuaa

SEQ ID NO: 548 - RNA, 21 nt, Artificial Sequence
  siRNA sense strand against APCS
aaaaugaaaugacugucuaag

SEQ ID NO: 549 - RNA, 21 nt, Artificial Sequence
  siRNA sense strand against APCS
aaaugaaaugacugucuaaga

SEQ ID NO: 550 - RNA, 21 nt, Artificial Sequence
  siRNA sense strand against APCS
aaugaaaugacugucuaagag

SEQ ID NO: 551 - RNA, 21 nt, Artificial Sequence
  siRNA sense strand against APCS
augaaaugacugucuaagaga

SEQ ID NO: 552 - RNA, 21 nt, Artificial Sequence
  siRNA sense strand against APCS
ugaaaugacugucuaagagau

SEQ ID NO: 553 - RNA, 21 nt, Artificial Sequence
  siRNA sense strand against APCS
gaaaugacugucuaagagauc

SEQ ID NO: 554 - RNA, 21 nt, Artificial Sequence
  siRNA sense strand against APCS
aaaugacugucuaagagaucu

SEQ ID NO: 555 - RNA, 21 nt, Artificial Sequence
  siRNA sense strand against APCS
augacugucuaagagaucugg

SEQ ID NO: 556 - RNA, 21 nt, Artificial Sequence
  siRNA sense strand against APCS
ugacugucuaagagaucuggu

SEQ ID NO: 557 - RNA, 21 nt, Artificial Sequence
  siRNA sense strand against APCS
gacugucuaagagaucugguc

SEQ ID NO: 558 - RNA, 21 nt, Artificial Sequence
  siRNA sense strand against APCS
acugucuaagagaucugguca

SEQ ID NO: 559 - RNA, 21 nt, Artificial Sequence
  siRNA sense strand against APCS
cugucuaagagaucuggucaa

SEQ ID NO: 560 - RNA, 21 nt, Artificial Sequence
  siRNA sense strand against APCS
ugucuaagagaucuggucaaa

SEQ ID NO: 561 - RNA, 21 nt, Artificial Sequence
  siRNA sense strand against APCS
gucuaagagaucuggucaaag

SEQ ID NO: 562 - RNA, 21 nt, Artificial Sequence
  siRNA sense strand against APCS
ucuaagagaucuggucaaagc

SEQ ID NO: 563 - RNA, 21 nt, Artificial Sequence
  siRNA sense strand against APCS
cuaagagaucuggucaaagca

SEQ ID NO: 564 - RNA, 21 nt, Artificial Sequence
  siRNA sense strand against APCS
uaagagaucuggucaaagcaa

SEQ ID NO: 565 - RNA, 21 nt, Artificial Sequence
  siRNA sense strand against APCS
aagagaucuggucaaagcaac

SEQ ID NO: 566 - RNA, 21 nt, Artificial Sequence
  siRNA sense strand against APCS
agagaucuggucaaagcaacu

SEQ ID NO: 567 - RNA, 21 nt, Artificial Sequence
  siRNA sense strand against APCS
gagaucuggucaaagcaacug

SEQ ID NO: 568 - RNA, 21 nt, Artificial Sequence
  siRNA sense strand against APCS
agaucuggucaaagcaacugg

SEQ ID NO: 569 - RNA, 21 nt, Artificial Sequence
  siRNA sense strand against APCS
gaucuggucaaagcaacugga

SEQ ID NO: 570 - RNA, 21 nt, Artificial Sequence
  siRNA sense strand against APCS
aucuggucaaagcaacuggau

SEQ ID NO: 571 - RNA, 21 nt, Artificial Sequence
  siRNA sense strand against APCS
ucuggucaaagcaacuggaua

SEQ ID NO: 572 - RNA, 21 nt, Artificial Sequence
  siRNA sense strand against APCS
cuggucaaagcaacuggauac

SEQ ID NO: 573 - RNA, 21 nt, Artificial Sequence
  siRNA sense strand against APCS
uggucaaagcaacuggauacu

SEQ ID NO: 574 - RNA, 21 nt, Artificial Sequence
  siRNA sense strand against APCS
ggucaaagcaacuggauacua

SEQ ID NO: 575 - RNA, 21 nt, Artificial Sequence
  siRNA sense strand against APCS
gucaaagcaacuggauacuag

SEQ ID NO: 576 - RNA, 21 nt, Artificial Sequence
  siRNA sense strand against APCS
ucaaagcaacuggauacuaga

SEQ ID NO: 577 - RNA, 21 nt, Artificial Sequence
  siRNA sense strand against APCS
caaagcaacuggauacuagau

SEQ ID NO: 578 - RNA, 21 nt, Artificial Sequence
  siRNA sense strand against APCS
aaagcaacuggauacuagauc

SEQ ID NO: 579 - RNA, 21 nt, Artificial Sequence
  siRNA sense strand against APCS
aagcaacuggauacuagaucu

SEQ ID NO: 580 - RNA, 21 nt, Artificial Sequence
  siRNA sense strand against APCS
agcaacuggauacuagaucuu

SEQ ID NO: 581 - RNA, 21 nt, Artificial Sequence
  siRNA sense strand against APCS
gcaacuggauacuagaucuua

SEQ ID NO: 582 - RNA, 21 nt, Artificial Sequence
  siRNA sense strand against APCS
caacuggauacuagaucuuac

SEQ ID NO: 583 - RNA, 21 nt, Artificial Sequence
  siRNA sense strand against APCS
aacuggauacuagaucuuaca

SEQ ID NO: 584 - RNA, 21 nt, Artificial Sequence
  siRNA sense strand against APCS
acuggauacuagaucuuacau

SEQ ID NO: 585 - RNA, 21 nt, Artificial Sequence
  siRNA sense strand against APCS
cuggauacuagaucuuacauc

SEQ ID NO: 586 - RNA, 21 nt, Artificial Sequence
  siRNA sense strand against APCS
uggauacuagaucuuacaucu

SEQ ID NO: 587 - RNA, 21 nt, Artificial Sequence
  siRNA sense strand against APCS
ggauacuagaucuuacaucug

SEQ ID NO: 588 - RNA, 21 nt, Artificial Sequence
  siRNA sense strand against APCS
gauacuagaucuuacaucugc

SEQ ID NO: 589 - RNA, 21 nt, Artificial Sequence
  siRNA sense strand against APCS
auacuagaucuuacaucugca

SEQ ID NO: 590 - RNA, 21 nt, Artificial Sequence
  siRNA sense strand against APCS
acuagaucuuacaucugcagc

SEQ ID NO: 591 - RNA, 21 nt, Artificial Sequence
  siRNA sense strand against APCS
cuagaucuuacaucugcagcu

SEQ ID NO: 592 - RNA, 21 nt, Artificial Sequence
  siRNA sense strand against APCS
agaucuuacaucugcagcucu

SEQ ID NO: 593 - RNA, 21 nt, Artificial Sequence
  siRNA sense strand against APCS
gaucuuacaucugcagcucuu

SEQ ID NO: 594 - RNA, 21 nt, Artificial Sequence
  siRNA sense strand against APCS
aucuuacaucugcagcucuuu

SEQ ID NO: 595 - RNA, 21 nt, Artificial Sequence
  siRNA sense strand against APCS
ucuuacaucugcagcucuuuc

SEQ ID NO: 596 - RNA, 21 nt, Artificial Sequence
  siRNA sense strand against APCS
cuuacaucugcagcucuuucu

SEQ ID NO: 597 - RNA, 21 nt, Artificial Sequence
  siRNA sense strand against APCS
uuacaucugcagcucuuucuu

SEQ ID NO: 598 - RNA, 21 nt, Artificial Sequence
  siRNA sense strand against APCS
uacaucugcagcucuuucuuc

SEQ ID NO: 599 - RNA, 21 nt, Artificial Sequence
  siRNA sense strand against APCS
acaucugcagcucuuucuucu

SEQ ID NO: 600 - RNA, 21 nt, Artificial Sequence
  siRNA sense strand against APCS
caucugcagcucuuucuucuu

SEQ ID NO: 601 - RNA, 21 nt, Artificial Sequence
  siRNA sense strand against APCS
aucugcagcucuuucuucuuu

SEQ ID NO: 602 - RNA, 21 nt, Artificial Sequence
  siRNA sense strand against APCS
ucugcagcucuuucuucuuug

SEQ ID NO: 603 - RNA, 21 nt, Artificial Sequence
  siRNA sense strand against APCS
cugcagcucuuucuucuuuga

SEQ ID NO: 604 - RNA, 21 nt, Artificial Sequence
  siRNA sense strand against APCS
ugcagcucuuucuucuuugaa

SEQ ID NO: 605 - RNA, 21 nt, Artificial Sequence
  siRNA sense strand against APCS
gcagcucuuucuucuuugaau

SEQ ID NO: 606 - RNA, 21 nt, Artificial Sequence
  siRNA sense strand against APCS
cagcucuuucuucuuugaauu

SEQ ID NO: 607 - RNA, 21 nt, Artificial Sequence
  siRNA sense strand against APCS
agcucuuucuucuuugaauuu

SEQ ID NO: 608 - RNA, 21 nt, Artificial Sequence
  siRNA sense strand against APCS
gcucuuucuucuuugaauuuc

SEQ ID NO: 609 - RNA, 21 nt, Artificial Sequence
  siRNA sense strand against APCS
cucuuucuucuuugaauuucc

SEQ ID NO: 610 - RNA, 21 nt, Artificial Sequence
  siRNA sense strand against APCS
ucuuucuucuuugaauuuccu

SEQ ID NO: 611 - RNA, 21 nt, Artificial Sequence
  siRNA sense strand against APCS
cuuucuucuuugaauuuccua

SEQ ID NO: 612 - RNA, 21 nt, Artificial Sequence
  siRNA sense strand against APCS
uuucuucuuugaauuuccuau

SEQ ID NO: 613 - RNA, 21 nt, Artificial Sequence
  siRNA sense strand against APCS
uucuucuuugaauuuccuauc

SEQ ID NO: 614 - RNA, 21 nt, Artificial Sequence
  siRNA sense strand against APCS
ucuucuuugaauuuccuaucu

SEQ ID NO: 615 - RNA, 21 nt, Artificial Sequence
  siRNA sense strand against APCS
uucuuugaauuuccuaucugu

SEQ ID NO: 616 - RNA, 21 nt, Artificial Sequence
  siRNA sense strand against APCS
ucuuugaauuuccuaucugua

SEQ ID NO: 617 - RNA, 21 nt, Artificial Sequence
  siRNA sense strand against APCS
cuuugaauuuccuaucuguau

SEQ ID NO: 618 - RNA, 21 nt, Artificial Sequence
  siRNA sense strand against APCS
uuugaauuuccuaucuguaug

SEQ ID NO: 619 - RNA, 21 nt, Artificial Sequence
  siRNA sense strand against APCS
uugaauuuccuaucuguaugu

SEQ ID NO: 620 - RNA, 21 nt, Artificial Sequence
  siRNA sense strand against APCS
ugaauuuccuaucuguauguc

SEQ ID NO: 621 - RNA, 21 nt, Artificial Sequence
  siRNA sense strand against APCS
gaauuuccuaucuguaugucu

SEQ ID NO: 622 - RNA, 21 nt, Artificial Sequence
  siRNA sense strand against APCS
auuuccuaucuguaugucugc

SEQ ID NO: 623 - RNA, 21 nt, Artificial Sequence
  siRNA sense strand against APCS
uuuccuaucuguaugucugcc

SEQ ID NO: 624 - RNA, 21 nt, Artificial Sequence
  siRNA sense strand against APCS
uuccuaucuguaugucugccu

SEQ ID NO: 625 - RNA, 21 nt, Artificial Sequence
  siRNA sense strand against APCS
uccuaucuguaugucugccua

SEQ ID NO: 626 - RNA, 21 nt, Artificial Sequence
  siRNA sense strand against APCS
ccuaucuguaugucugccuaa

SEQ ID NO: 627 - RNA, 21 nt, Artificial Sequence
  siRNA sense strand against APCS
cuaucuguaugucugccuaau

SEQ ID NO: 628 - RNA, 21 nt, Artificial Sequence
  siRNA sense strand against APCS
uaucuguaugucugccuaauu

SEQ ID NO: 629 - RNA, 21 nt, Artificial Sequence
  siRNA sense strand against APCS
aucuguaugucugccuaauua

SEQ ID NO: 630 - RNA, 21 nt, Artificial Sequence
  siRNA sense strand against APCS
ucuguaugucugccuaauuaa

SEQ ID NO: 631 - RNA, 21 nt, Artificial Sequence
  siRNA sense strand against APCS
cuguaugucugccuaauuaaa

SEQ ID NO: 632 - RNA, 21 nt, Artificial Sequence
  siRNA sense strand against APCS
uguaugucugccuaauuaaaa

SEQ ID NO: 633 - RNA, 21 nt, Artificial Sequence
  siRNA sense strand against APCS
guaugucugccuaauuaaaaa

SEQ ID NO: 634 - RNA, 21 nt, Artificial Sequence
  siRNA sense strand against APCS
uaugucugccuaauuaaaaaa

SEQ ID NO: 635 - RNA, 21 nt, Artificial Sequence
  siRNA sense strand against APCS
augucugccuaauuaaaaaaa

SEQ ID NO: 636 - RNA, 21 nt, Artificial Sequence
  siRNA sense strand against APCS
ugucugccuaauuaaaaaaau

SEQ ID NO: 637 - RNA, 21 nt, Artificial Sequence
  siRNA sense strand against APCS
gucugccuaauuaaaaaaaua

SEQ ID NO: 638 - RNA, 21 nt, Artificial Sequence
  siRNA sense strand against APCS
ucugccuaauuaaaaaaauau

SEQ ID NO: 639 - RNA, 21 nt, Artificial Sequence
  siRNA sense strand against APCS
cugccuaauuaaaaaaauaua

SEQ ID NO: 640 - RNA, 21 nt, Artificial Sequence
  siRNA sense strand against APCS
ugccuaauuaaaaaaauauau

SEQ ID NO: 641 - RNA, 21 nt, Artificial Sequence
  siRNA sense strand against APCS
gccuaauuaaaaaaauauaua

SEQ ID NO: 642 - RNA, 21 nt, Artificial Sequence
  siRNA sense strand against APCS
ccuaauuaaaaaaauauauau

SEQ ID NO: 643 - RNA, 21 nt, Artificial Sequence
  siRNA sense strand against APCS
cuaauuaaaaaaauauauauu

SEQ ID NO: 644 - RNA, 21 nt, Artificial Sequence
  siRNA sense strand against APCS
uaaaaaaauauauauuguauu

SEQ ID NO: 645 - RNA, 21 nt, Artificial Sequence
  siRNA antisense strand against APCS
uagcgucugauauucaugccc

SEQ ID NO: 646 - RNA, 21 nt, Artificial Sequence
  siRNA antisense strand against APCS
cuagcgucugauauucaugcc

SEQ ID NO: 647 - RNA, 21 nt, Artificial Sequence
  siRNA antisense strand against APCS
ucccccuagcgucugauauuc

SEQ ID NO: 648 - RNA, 21 nt, Artificial Sequence
  siRNA antisense strand against APCS
acaguggcugucccccuagcg

SEQ ID NO: 649 - RNA, 21 nt, Artificial Sequence
  siRNA antisense strand against APCS
acacaguggcugucccccuag

SEQ ID NO: 650 - RNA, 21 nt, Artificial Sequence
  siRNA antisense strand against APCS
caacacaguggcugucccccu

SEQ ID NO: 651 - RNA, 21 nt, Artificial Sequence
  siRNA antisense strand against APCS
acaacacaguggcuguccccc

SEQ ID NO: 652 - RNA, 21 nt, Artificial Sequence
  siRNA antisense strand against APCS
gacaacacaguggcugucccc

SEQ ID NO: 653 - RNA, 21 nt, Artificial Sequence
  siRNA antisense strand against APCS
agacaacacaguggcuguccc

SEQ ID NO: 654 - RNA, 21 nt, Artificial Sequence
  siRNA antisense strand against APCS
uagcagacaacacaguggcug

SEQ ID NO: 655 - RNA, 21 nt, Artificial Sequence
  siRNA antisense strand against APCS
guagcagacaacacaguggcu

SEQ ID NO: 656 - RNA, 21 nt, Artificial Sequence
  siRNA antisense strand against APCS
gguagcagacaacacaguggc

SEQ ID NO: 657 - RNA, 21 nt, Artificial Sequence
  siRNA antisense strand against APCS
aggguagcagacaacacagug

SEQ ID NO: 658 - RNA, 21 nt, Artificial Sequence
  siRNA antisense strand against APCS
gaggguagcagacaacacagu

SEQ ID NO: 659 - RNA, 21 nt, Artificial Sequence
  siRNA antisense strand against APCS
ugaggguagcagacaacacag

SEQ ID NO: 660 - RNA, 21 nt, Artificial Sequence
  siRNA antisense strand against APCS
augaggguagcagacaacaca

SEQ ID NO: 661 - RNA, 21 nt, Artificial Sequence
  siRNA antisense strand against APCS
gaugaggguagcagacaacac

SEQ ID NO: 662 - RNA, 21 nt, Artificial Sequence
  siRNA antisense strand against APCS
caggaugaggguagcagacaa

SEQ ID NO: 663 - RNA, 21 nt, Artificial Sequence
  siRNA antisense strand against APCS
accaggaugaggguagcagac

SEQ ID NO: 664 - RNA, 21 nt, Artificial Sequence
  siRNA antisense strand against APCS
ugaccaggaugaggguagcag

SEQ ID NO: 665 - RNA, 21 nt, Artificial Sequence
  siRNA antisense strand against APCS
gugaccaggaugaggguagca

SEQ ID NO: 666 - RNA, 21 nt, Artificial Sequence
  siRNA antisense strand against APCS
agugaccaggaugaggguagc

SEQ ID NO: 667 - RNA, 21 nt, Artificial Sequence
  siRNA antisense strand against APCS
cagugaccaggaugaggguag

SEQ ID NO: 668 - RNA, 21 nt, Artificial Sequence
  siRNA antisense strand against APCS
gcagugaccaggaugagggua

SEQ ID NO: 669 - RNA, 21 nt, Artificial Sequence
  siRNA antisense strand against APCS
agcagugaccaggaugagggu

SEQ ID NO: 670 - RNA, 21 nt, Artificial Sequence
  siRNA antisense strand against APCS
aagcagugaccaggaugaggg

SEQ ID NO: 671 - RNA, 21 nt, Artificial Sequence
  siRNA antisense strand against APCS
agaagcagugaccaggaugag

SEQ ID NO: 672 - RNA, 21 nt, Artificial Sequence
  siRNA antisense strand against APCS
cagaagcagugaccaggauga

SEQ ID NO: 673 - RNA, 21 nt, Artificial Sequence
  siRNA antisense strand against APCS
gcagaagcagugaccaggaug

SEQ ID NO: 674 - RNA, 21 nt, Artificial Sequence
  siRNA antisense strand against APCS
agcagaagcagugaccaggau

SEQ ID NO: 675 - RNA, 21 nt, Artificial Sequence
  siRNA antisense strand against APCS
uagcagaagcagugaccagga

SEQ ID NO: 676 - RNA, 21 nt, Artificial Sequence
  siRNA antisense strand against APCS
auagcagaagcagugaccagg

SEQ ID NO: 677 - RNA, 21 nt, Artificial Sequence
  siRNA antisense strand against APCS
uauagcagaagcagugaccag

SEQ ID NO: 678 - RNA, 21 nt, Artificial Sequence
  siRNA antisense strand against APCS
uuauagcagaagcagugacca

SEQ ID NO: 679 - RNA, 21 nt, Artificial Sequence
  siRNA antisense strand against APCS
uguuauagcagaagcagugac

SEQ ID NO: 680 - RNA, 21 nt, Artificial Sequence
  siRNA antisense strand against APCS
cuguuauagcagaagcaguga

SEQ ID NO: 681 - RNA, 21 nt, Artificial Sequence
  siRNA antisense strand against APCS
gcuguuauagcagaagcagug

SEQ ID NO: 682 - RNA, 21 nt, Artificial Sequence
  siRNA antisense strand against APCS
gggcuguuauagcagaagcag

SEQ ID NO: 683 - RNA, 21 nt, Artificial Sequence
  siRNA antisense strand against APCS
agggcuguuauagcagaagca

SEQ ID NO: 684 - RNA, 21 nt, Artificial Sequence
  siRNA antisense strand against APCS
uagggcuguuauagcagaagc

SEQ ID NO: 685 - RNA, 21 nt, Artificial Sequence
  siRNA antisense strand against APCS
cuagggcuguuauagcagaag

SEQ ID NO: 686 - RNA, 21 nt, Artificial Sequence
  siRNA antisense strand against APCS
ccuagggcuguuauagcagaa

SEQ ID NO: 687 - RNA, 21 nt, Artificial Sequence
  siRNA antisense strand against APCS
gccuagggcuguuauagcaga

SEQ ID NO: 688 - RNA, 21 nt, Artificial Sequence
  siRNA antisense strand against APCS
ggccuagggcuguuauagcag

SEQ ID NO: 689 - RNA, 21 nt, Artificial Sequence
  siRNA antisense strand against APCS
uggccuagggcuguuauagca

SEQ ID NO: 690 - RNA, 21 nt, Artificial Sequence
  siRNA antisense strand against APCS
cuggccuagggcuguuauagc

SEQ ID NO: 691 - RNA, 21 nt, Artificial Sequence
  siRNA antisense strand against APCS
ccuggccuagggcuguuauag

SEQ ID NO: 692 - RNA, 21 nt, Artificial Sequence
  siRNA antisense strand against APCS
uccuggccuagggcuguuaua

SEQ ID NO: 693 - RNA, 21 nt, Artificial Sequence
  siRNA antisense strand against APCS
auuccuggccuagggcuguua

SEQ ID NO: 694 - RNA, 21 nt, Artificial Sequence
  siRNA antisense strand against APCS
uauuccuggccuagggcuguu

SEQ ID NO: 695 - RNA, 21 nt, Artificial Sequence
  siRNA antisense strand against APCS
auauuccuggccuagggcugu

SEQ ID NO: 696 - RNA, 21 nt, Artificial Sequence
  siRNA antisense strand against APCS
cauauuccuggccuagggcug

SEQ ID NO: 697 - RNA, 21 nt, Artificial Sequence
  siRNA antisense strand against APCS
ucauauuccuggccuagggcu

SEQ ID NO: 698 - RNA, 21 nt, Artificial Sequence
  siRNA antisense strand against APCS
uucauauuccuggccuagggc

SEQ ID NO: 699 - RNA, 21 nt, Artificial Sequence
  siRNA antisense strand against APCS
guucauauuccuggccuaggg

SEQ ID NO: 700 - RNA, 21 nt, Artificial Sequence
  siRNA antisense strand against APCS
uguucauauuccuggccuagg

SEQ ID NO: 701 - RNA, 21 nt, Artificial Sequence
  siRNA antisense strand against APCS
uuguucauauuccuggccuag

SEQ ID NO: 702 - RNA, 21 nt, Artificial Sequence
  siRNA antisense strand against APCS
cuuguucauauuccuggccua

SEQ ID NO: 703 - RNA, 21 nt, Artificial Sequence
  siRNA antisense strand against APCS
gcuuguucauauuccuggccu

SEQ ID NO: 704 - RNA, 21 nt, Artificial Sequence
  siRNA antisense strand against APCS
ggcuuguucauauuccuggcc

SEQ ID NO: 705 - RNA, 21 nt, Artificial Sequence
  siRNA antisense strand against APCS
cggcuuguucauauuccuggc

SEQ ID NO: 706 - RNA, 21 nt, Artificial Sequence
  siRNA antisense strand against APCS
gcggcuuguucauauuccugg

SEQ ID NO: 707 - RNA, 21 nt, Artificial Sequence
  siRNA antisense strand against APCS
agcggcuuguucauauuccug

SEQ ID NO: 708 - RNA, 21 nt, Artificial Sequence
  siRNA antisense strand against APCS
cagcggcuuguucauauuccu

SEQ ID NO: 709 - RNA, 21 nt, Artificial Sequence
  siRNA antisense strand against APCS
gcagcggcuuguucauauucc

SEQ ID NO: 710 - RNA, 21 nt, Artificial Sequence
  siRNA antisense strand against APCS
agcagcggcuuguucauauuc

SEQ ID NO: 711 - RNA, 21 nt, Artificial Sequence
  siRNA antisense strand against APCS
aagcagcggcuuguucauauu

SEQ ID NO: 712 - RNA, 21 nt, Artificial Sequence
  siRNA antisense strand against APCS
aaagcagcggcuuguucauau

SEQ ID NO: 713 - RNA, 21 nt, Artificial Sequence
  siRNA antisense strand against APCS
caaagcagcggcuuguucaua

SEQ ID NO: 714 - RNA, 21 nt, Artificial Sequence
  siRNA antisense strand against APCS
ccaaagcagcggcuuguucau

SEQ ID NO: 715 - RNA, 21 nt, Artificial Sequence
  siRNA antisense strand against APCS
uccaaagcagcggcuuguuca

SEQ ID NO: 716 - RNA, 21 nt, Artificial Sequence
  siRNA antisense strand against APCS
auccaaagcagcggcuuguuc

SEQ ID NO: 717 - RNA, 21 nt, Artificial Sequence
  siRNA antisense strand against APCS
gauccaaagcagcggcuuguu

SEQ ID NO: 718 - RNA, 21 nt, Artificial Sequence
  siRNA antisense strand against APCS
agauccaaagcagcggcuugu

SEQ ID NO: 719 - RNA, 21 nt, Artificial Sequence
  siRNA antisense strand against APCS
gagauccaaagcagcggcuug

SEQ ID NO: 720 - RNA, 21 nt, Artificial Sequence
  siRNA antisense strand against APCS
agagauccaaagcagcggcuu

SEQ ID NO: 721 - RNA, 21 nt, Artificial Sequence
  siRNA antisense strand against APCS
cagagauccaaagcagcggcu

SEQ ID NO: 722 - RNA, 21 nt, Artificial Sequence
  siRNA antisense strand against APCS
acagagauccaaagcagcggc

SEQ ID NO: 723 - RNA, 21 nt, Artificial Sequence
  siRNA antisense strand against APCS
gacagagauccaaagcagcgg

SEQ ID NO: 724 - RNA, 21 nt, Artificial Sequence
  siRNA antisense strand against APCS
ggacagagauccaaagcagcg

SEQ ID NO: 725 - RNA, 21 nt, Artificial Sequence
  siRNA antisense strand against APCS
aggacagagauccaaagcagc

SEQ ID NO: 726 - RNA, 21 nt, Artificial Sequence
  siRNA antisense strand against APCS
gaggacagagauccaaagcag

SEQ ID NO: 727 - RNA, 21 nt, Artificial Sequence
  siRNA antisense strand against APCS
ugaggacagagauccaaagca

SEQ ID NO: 728 - RNA, 21 nt, Artificial Sequence
  siRNA antisense strand against APCS
gugaggacagagauccaaagc

SEQ ID NO: 729 - RNA, 21 nt, Artificial Sequence
  siRNA antisense strand against APCS
cuggugaggacagagauccaa

SEQ ID NO: 730 - RNA, 21 nt, Artificial Sequence
  siRNA antisense strand against APCS
gcuggugaggacagagaucca

SEQ ID NO: 731 - RNA, 21 nt, Artificial Sequence
  siRNA antisense strand against APCS
gaggcuggugaggacagagau

SEQ ID NO: 732 - RNA, 21 nt, Artificial Sequence
  siRNA antisense strand against APCS
aggaggcuggugaggacagag

SEQ ID NO: 733 - RNA, 21 nt, Artificial Sequence
  siRNA antisense strand against APCS
caggaggcuggugaggacaga

SEQ ID NO: 734 - RNA, 21 nt, Artificial Sequence
  siRNA antisense strand against APCS
ccaggaggcuggugaggacag

SEQ ID NO: 735 - RNA, 21 nt, Artificial Sequence
  siRNA antisense strand against APCS
uccaggaggcuggugaggaca

SEQ ID NO: 736 - RNA, 21 nt, Artificial Sequence
  siRNA antisense strand against APCS
cuuccaggaggcuggugagga

SEQ ID NO: 737 - RNA, 21 nt, Artificial Sequence
  siRNA antisense strand against APCS
gcuuccaggaggcuggugagg

SEQ ID NO: 738 - RNA, 21 nt, Artificial Sequence
  siRNA antisense strand against APCS
aggcuuccaggaggcugguga

SEQ ID NO: 739 - RNA, 21 nt, Artificial Sequence
  siRNA antisense strand against APCS
aaggcuuccaggaggcuggug

SEQ ID NO: 740 - RNA, 21 nt, Artificial Sequence
  siRNA antisense strand against APCS
aaaggcuuccaggaggcuggu

SEQ ID NO: 741 - RNA, 21 nt, Artificial Sequence
  siRNA antisense strand against APCS
caaaggcuuccaggaggcugg

SEQ ID NO: 742 - RNA, 21 nt, Artificial Sequence
  siRNA antisense strand against APCS
gcaaaggcuuccaggaggcug

SEQ ID NO: 743 - RNA, 21 nt, Artificial Sequence
  siRNA antisense strand against APCS
agcaaaggcuuccaggaggcu

SEQ ID NO: 744 - RNA, 21 nt, Artificial Sequence
  siRNA antisense strand against APCS
gagcaaaggcuuccaggaggc

SEQ ID NO: 745 - RNA, 21 nt, Artificial Sequence
  siRNA antisense strand against APCS
ugagcaaaggcuuccaggagg

SEQ ID NO: 746 - RNA, 21 nt, Artificial Sequence
  siRNA antisense strand against APCS
gugagcaaaggcuuccaggag

SEQ ID NO: 747 - RNA, 21 nt, Artificial Sequence
  siRNA antisense strand against APCS
ugugagcaaaggcuuccagga

SEQ ID NO: 748 - RNA, 21 nt, Artificial Sequence
  siRNA antisense strand against APCS
ugugugagcaaaggcuuccag

SEQ ID NO: 749 - RNA, 21 nt, Artificial Sequence
  siRNA antisense strand against APCS
cugugugagcaaaggcuucca

SEQ ID NO: 750 - RNA, 21 nt, Artificial Sequence
  siRNA antisense strand against APCS
ucugugugagcaaaggcuucc

SEQ ID NO: 751 - RNA, 21 nt, Artificial Sequence
  siRNA antisense strand against APCS
gucugugugagcaaaggcuuc

SEQ ID NO: 752 - RNA, 21 nt, Artificial Sequence
  siRNA antisense strand against APCS
ggucugugugagcaaaggcuu

SEQ ID NO: 753 - RNA, 21 nt, Artificial Sequence
  siRNA antisense strand against APCS
aggucugugugagcaaaggcu

SEQ ID NO: 754 - RNA, 21 nt, Artificial Sequence
  siRNA antisense strand against APCS
gaggucugugugagcaaaggc

SEQ ID NO: 755 - RNA, 21 nt, Artificial Sequence
  siRNA antisense strand against APCS
ugaggucugugugagcaaagg

SEQ ID NO: 756 - RNA, 21 nt, Artificial Sequence
  siRNA antisense strand against APCS
acugaggucugugugagcaaa

SEQ ID NO: 757 - RNA, 21 nt, Artificial Sequence
  siRNA antisense strand against APCS
ccacugaggucugugugagca

SEQ ID NO: 758 - RNA, 21 nt, Artificial Sequence
  siRNA antisense strand against APCS
ucccacugaggucugugugag

SEQ ID NO: 759 - RNA, 21 nt, Artificial Sequence
  siRNA antisense strand against APCS
uucccacugaggucuguguga

SEQ ID NO: 760 - RNA, 21 nt, Artificial Sequence
  siRNA antisense strand against APCS
cuucccacugaggucugugug

SEQ ID NO: 761 - RNA, 21 nt, Artificial Sequence
  siRNA antisense strand against APCS
caccuucccacugaggucugu

SEQ ID NO: 762 - RNA, 21 nt, Artificial Sequence
  siRNA antisense strand against APCS
acaccuucccacugaggucug

SEQ ID NO: 763 - RNA, 21 nt, Artificial Sequence
  siRNA antisense strand against APCS
aacaccuucccacugaggucu

SEQ ID NO: 764 - RNA, 21 nt, Artificial Sequence
  siRNA antisense strand against APCS
aaacaccuucccacugagguc

SEQ ID NO: 765 - RNA, 21 nt, Artificial Sequence
  siRNA antisense strand against APCS
caaacaccuucccacugaggu

SEQ ID NO: 766 - RNA, 21 nt, Artificial Sequence
  siRNA antisense strand against APCS
acaaacaccuucccacugagg

SEQ ID NO: 767 - RNA, 21 nt, Artificial Sequence
  siRNA antisense strand against APCS
uacaaacaccuucccacugag

SEQ ID NO: 768 - RNA, 21 nt, Artificial Sequence
  siRNA antisense strand against APCS
auacaaacaccuucccacuga

SEQ ID NO: 769 - RNA, 21 nt, Artificial Sequence
  siRNA antisense strand against APCS
aauacaaacaccuucccacug

SEQ ID NO: 770 - RNA, 21 nt, Artificial Sequence
  siRNA antisense strand against APCS
aaauacaaacaccuucccacu

SEQ ID NO: 771 - RNA, 21 nt, Artificial Sequence
  siRNA antisense strand against APCS
gaaauacaaacaccuucccac

SEQ ID NO: 772 - RNA, 21 nt, Artificial Sequence
  siRNA antisense strand against APCS
ggaaauacaaacaccuuccca

SEQ ID NO: 773 - RNA, 21 nt, Artificial Sequence
  siRNA antisense strand against APCS
aggaaauacaaacaccuuccc

SEQ ID NO: 774 - RNA, 21 nt, Artificial Sequence
  siRNA antisense strand against APCS
uaggaaauacaaacaccuucc

SEQ ID NO: 775 - RNA, 21 nt, Artificial Sequence
  siRNA antisense strand against APCS
cuaggaaauacaaacaccuuc

SEQ ID NO: 776 - RNA, 21 nt, Artificial Sequence
  siRNA antisense strand against APCS
ucuaggaaauacaaacaccuu

SEQ ID NO: 777 - RNA, 21 nt, Artificial Sequence
  siRNA antisense strand against APCS
cucuaggaaauacaaacaccu

SEQ ID NO: 778 - RNA, 21 nt, Artificial Sequence
  siRNA antisense strand against APCS
ucucuaggaaauacaaacacc

SEQ ID NO: 779 - RNA, 21 nt, Artificial Sequence
  siRNA antisense strand against APCS
uucucuaggaaauacaaacac

SEQ ID NO: 780 - RNA, 21 nt, Artificial Sequence
  siRNA antisense strand against APCS
auucucuaggaaauacaaaca

SEQ ID NO: 781 - RNA, 21 nt, Artificial Sequence
  siRNA antisense strand against APCS
gauucucuaggaaauacaaac

SEQ ID NO: 782 - RNA, 21 nt, Artificial Sequence
  siRNA antisense strand against APCS
agauucucuaggaaauacaaa

SEQ ID NO: 783 - RNA, 21 nt, Artificial Sequence
  siRNA antisense strand against APCS
cagauucucuaggaaauacaa

SEQ ID NO: 784 - RNA, 21 nt, Artificial Sequence
  siRNA antisense strand against APCS
acagauucucuaggaaauaca

SEQ ID NO: 785 - RNA, 21 nt, Artificial Sequence
  siRNA antisense strand against APCS
aacagauucucuaggaaauac

SEQ ID NO: 786 - RNA, 21 nt, Artificial Sequence
  siRNA antisense strand against APCS
uaacagauucucuaggaaaua

SEQ ID NO: 787 - RNA, 21 nt, Artificial Sequence
  siRNA antisense strand against APCS
aguaacagauucucuaggaaa

SEQ ID NO: 788 - RNA, 21 nt, Artificial Sequence
  siRNA antisense strand against APCS
caguaacagauucucuaggaa

SEQ ID NO: 789 - RNA, 21 nt, Artificial Sequence
  siRNA antisense strand against APCS
ucaguaacagauucucuagga

SEQ ID NO: 790 - RNA, 21 nt, Artificial Sequence
  siRNA antisense strand against APCS
aucaguaacagauucucuagg

SEQ ID NO: 791 - RNA, 21 nt, Artificial Sequence
  siRNA antisense strand against APCS
gaucaguaacagauucucuag

SEQ ID NO: 792 - RNA, 21 nt, Artificial Sequence
  siRNA antisense strand against APCS
ugaucaguaacagauucucua

SEQ ID NO: 793 - RNA, 21 nt, Artificial Sequence
  siRNA antisense strand against APCS
augaucaguaacagauucucu

SEQ ID NO: 794 - RNA, 21 nt, Artificial Sequence
  siRNA antisense strand against APCS
caugaucaguaacagauucuc

SEQ ID NO: 795 - RNA, 21 nt, Artificial Sequence
  siRNA antisense strand against APCS
acaugaucaguaacagauucu

SEQ ID NO: 796 - RNA, 21 nt, Artificial Sequence
  siRNA antisense strand against APCS
uacaugaucaguaacagauuc

SEQ ID NO: 797 - RNA, 21 nt, Artificial Sequence
  siRNA antisense strand against APCS
uuacaugaucaguaacagauu

SEQ ID NO: 798 - RNA, 21 nt, Artificial Sequence
  siRNA antisense strand against APCS
uuuacaugaucaguaacagau

SEQ ID NO: 799 - RNA, 21 nt, Artificial Sequence
  siRNA antisense strand against APCS
guuuacaugaucaguaacaga

SEQ ID NO: 800 - RNA, 21 nt, Artificial Sequence
  siRNA antisense strand against APCS
aguuuacaugaucaguaacag

SEQ ID NO: 801 - RNA, 21 nt, Artificial Sequence
  siRNA antisense strand against APCS
ucaaguuuacaugaucaguaa

SEQ ID NO: 802 - RNA, 21 nt, Artificial Sequence
  siRNA antisense strand against APCS
aucaaguuuacaugaucagua

SEQ ID NO: 803 - RNA, 21 nt, Artificial Sequence
  siRNA antisense strand against APCS
gaucaaguuuacaugaucagu

SEQ ID NO: 804 - RNA, 21 nt, Artificial Sequence
  siRNA antisense strand against APCS
ugaucaaguuuacaugaucag

SEQ ID NO: 805 - RNA, 21 nt, Artificial Sequence
  siRNA antisense strand against APCS
ugugaucaaguuuacaugauc

SEQ ID NO: 806 - RNA, 21 nt, Artificial Sequence
  siRNA antisense strand against APCS
gugugaucaaguuuacaugau

SEQ ID NO: 807 - RNA, 21 nt, Artificial Sequence
  siRNA antisense strand against APCS
agcggugugaucaaguuuaca

SEQ ID NO: 808 - RNA, 21 nt, Artificial Sequence
  siRNA antisense strand against APCS
cagcggugugaucaaguuuac

SEQ ID NO: 809 - RNA, 21 nt, Artificial Sequence
  siRNA antisense strand against APCS
uccagcggugugaucaaguuu

SEQ ID NO: 810 - RNA, 21 nt, Artificial Sequence
  siRNA antisense strand against APCS
ucuccagcggugugaucaagu

SEQ ID NO: 811 - RNA, 21 nt, Artificial Sequence
  siRNA antisense strand against APCS
uucuccagcggugugaucaag

SEQ ID NO: 812 - RNA, 21 nt, Artificial Sequence
  siRNA antisense strand against APCS
cuucuccagcggugugaucaa

SEQ ID NO: 813 - RNA, 21 nt, Artificial Sequence
  siRNA antisense strand against APCS
aggcuucuccagcggugugau

SEQ ID NO: 814 - RNA, 21 nt, Artificial Sequence
  siRNA antisense strand against APCS
gaggcuucuccagcgguguga

SEQ ID NO: 815 - RNA, 21 nt, Artificial Sequence
  siRNA antisense strand against APCS
agaggcuucuccagcggugug

SEQ ID NO: 816 - RNA, 21 nt, Artificial Sequence
  siRNA antisense strand against APCS
uagaggcuucuccagcggugu

SEQ ID NO: 817 - RNA, 21 nt, Artificial Sequence
  siRNA antisense strand against APCS
guagaggcuucuccagcggug

SEQ ID NO: 818 - RNA, 21 nt, Artificial Sequence
  siRNA antisense strand against APCS
uguagaggcuucuccagcggu

SEQ ID NO: 819 - RNA, 21 nt, Artificial Sequence
  siRNA antisense strand against APCS
cuguagaggcuucuccagcgg

SEQ ID NO: 820 - RNA, 21 nt, Artificial Sequence
  siRNA antisense strand against APCS
ucuguagaggcuucuccagcg

SEQ ID NO: 821 - RNA, 21 nt, Artificial Sequence
  siRNA antisense strand against APCS
uucuguagaggcuucuccagc

SEQ ID NO: 822 - RNA, 21 nt, Artificial Sequence
  siRNA antisense strand against APCS
guucuguagaggcuucuccag

SEQ ID NO: 823 - RNA, 21 nt, Artificial Sequence
  siRNA antisense strand against APCS
aguucuguagaggcuucucca

SEQ ID NO: 824 - RNA, 21 nt, Artificial Sequence
  siRNA antisense strand against APCS
aaguucuguagaggcuucucc

SEQ ID NO: 825 - RNA, 21 nt, Artificial Sequence
  siRNA antisense strand against APCS
aaaguucuguagaggcuucuc

SEQ ID NO: 826 - RNA, 21 nt, Artificial Sequence
  siRNA antisense strand against APCS
uaaaguucuguagaggcuucu

SEQ ID NO: 827 - RNA, 21 nt, Artificial Sequence
  siRNA antisense strand against APCS
guaaaguucuguagaggcuuc

SEQ ID NO: 828 - RNA, 21 nt, Artificial Sequence
  siRNA antisense strand against APCS
gguaaaguucuguagaggcuu

SEQ ID NO: 829 - RNA, 21 nt, Artificial Sequence
  siRNA antisense strand against APCS
agguaaaguucuguagaggcu

SEQ ID NO: 830 - RNA, 21 nt, Artificial Sequence
  siRNA antisense strand against APCS
aagguaaaguucuguagaggc

SEQ ID NO: 831 - RNA, 21 nt, Artificial Sequence
  siRNA antisense strand against APCS
caagguaaaguucuguagagg

SEQ ID NO: 832 - RNA, 21 nt, Artificial Sequence
  siRNA antisense strand against APCS
acaagguaaaguucuguagag

SEQ ID NO: 833 - RNA, 21 nt, Artificial Sequence
  siRNA antisense strand against APCS
cacaagguaaaguucuguaga

SEQ ID NO: 834 - RNA, 21 nt, Artificial Sequence
  siRNA antisense strand against APCS
acacaagguaaaguucuguag

SEQ ID NO: 835 - RNA, 21 nt, Artificial Sequence
  siRNA antisense strand against APCS
aacacaagguaaaguucugua

SEQ ID NO: 836 - RNA, 21 nt, Artificial Sequence
  siRNA antisense strand against APCS
aaacacaagguaaaguucugu

SEQ ID NO: 837 - RNA, 21 nt, Artificial Sequence
  siRNA antisense strand against APCS
aaaacacaagguaaaguucug

SEQ ID NO: 838 - RNA, 21 nt, Artificial Sequence
  siRNA antisense strand against APCS
gaaaacacaagguaaaguucu

SEQ ID NO: 839 - RNA, 21 nt, Artificial Sequence
  siRNA antisense strand against APCS
ucgaaaacacaagguaaaguu

SEQ ID NO: 840 - RNA, 21 nt, Artificial Sequence
  siRNA antisense strand against APCS
aggcucgaaaacacaagguaa

SEQ ID NO: 841 - RNA, 21 nt, Artificial Sequence
  siRNA antisense strand against APCS
uaggcucgaaaacacaaggua

SEQ ID NO: 842 - RNA, 21 nt, Artificial Sequence
  siRNA antisense strand against APCS
auaggcucgaaaacacaaggu

SEQ ID NO: 843 - RNA, 21 nt, Artificial Sequence
  siRNA antisense strand against APCS
uauaggcucgaaaacacaagg

SEQ ID NO: 844 - RNA, 21 nt, Artificial Sequence
  siRNA antisense strand against APCS
acuauaggcucgaaaacacaa

SEQ ID NO: 845 - RNA, 21 nt, Artificial Sequence
  siRNA antisense strand against APCS
ucacuauaggcucgaaaacac

SEQ ID NO: 846 - RNA, 21 nt, Artificial Sequence
  siRNA antisense strand against APCS
aucacuauaggcucgaaaaca

SEQ ID NO: 847 - RNA, 21 nt, Artificial Sequence
  siRNA antisense strand against APCS
agagaucacuauaggcucgaa

SEQ ID NO: 848 - RNA, 21 nt, Artificial Sequence
  siRNA antisense strand against APCS
gagagaucacuauaggcucga

SEQ ID NO: 849 - RNA, 21 nt, Artificial Sequence
  siRNA antisense strand against APCS
agagagaucacuauaggcucg

SEQ ID NO: 850 - RNA, 21 nt, Artificial Sequence
  siRNA antisense strand against APCS
gagagagaucacuauaggcuc

SEQ ID NO: 851 - RNA, 21 nt, Artificial Sequence
  siRNA antisense strand against APCS
cgagagagaucacuauaggcu

SEQ ID NO: 852 - RNA, 21 nt, Artificial Sequence
  siRNA antisense strand against APCS
acgagagagaucacuauaggc

SEQ ID NO: 853 - RNA, 21 nt, Artificial Sequence
  siRNA antisense strand against APCS
cacgagagagaucacuauagg

SEQ ID NO: 854 - RNA, 21 nt, Artificial Sequence
  siRNA antisense strand against APCS
aggcacgagagagaucacuau

SEQ ID NO: 855 - RNA, 21 nt, Artificial Sequence
  siRNA antisense strand against APCS
uaggcacgagagagaucacua

SEQ ID NO: 856 - RNA, 21 nt, Artificial Sequence
  siRNA antisense strand against APCS
guaggcacgagagagaucacu

SEQ ID NO: 857 - RNA, 21 nt, Artificial Sequence
  siRNA antisense strand against APCS
uguaggcacgagagagaucac

SEQ ID NO: 858 - RNA, 21 nt, Artificial Sequence
  siRNA antisense strand against APCS
gaggcuguaggcacgagagag

SEQ ID NO: 859 - RNA, 21 nt, Artificial Sequence
  siRNA antisense strand against APCS
agaggcuguaggcacgagaga

SEQ ID NO: 860 - RNA, 21 nt, Artificial Sequence
  siRNA antisense strand against APCS
aagaggcuguaggcacgagag

SEQ ID NO: 861 - RNA, 21 nt, Artificial Sequence
  siRNA antisense strand against APCS
agaagaggcuguaggcacgag

SEQ ID NO: 862 - RNA, 21 nt, Artificial Sequence
  siRNA antisense strand against APCS
gagaagaggcuguaggcacga

SEQ ID NO: 863 - RNA, 21 nt, Artificial Sequence
  siRNA antisense strand against APCS
aggagaagaggcuguaggcac

SEQ ID NO: 864 - RNA, 21 nt, Artificial Sequence
  siRNA antisense strand against APCS
uaggagaagaggcuguaggca

SEQ ID NO: 865 - RNA, 21 nt, Artificial Sequence
  siRNA antisense strand against APCS
guaggagaagaggcuguaggc

SEQ ID NO: 866 - RNA, 21 nt, Artificial Sequence
  siRNA antisense strand against APCS
uguaggagaagaggcuguagg

SEQ ID NO: 867 - RNA, 21 nt, Artificial Sequence
  siRNA antisense strand against APCS
uuguaggagaagaggcuguag

SEQ ID NO: 868 - RNA, 21 nt, Artificial Sequence
  siRNA antisense strand against APCS
auuguaggagaagaggcugua

SEQ ID NO: 869 - RNA, 21 nt, Artificial Sequence
  siRNA antisense strand against APCS
uauuguaggagaagaggcugu

SEQ ID NO: 870 - RNA, 21 nt, Artificial Sequence
  siRNA antisense strand against APCS
guauuguaggagaagaggcug

SEQ ID NO: 871 - RNA, 21 nt, Artificial Sequence
  siRNA antisense strand against APCS
gguauuguaggagaagaggcu

SEQ ID NO: 872 - RNA, 21 nt, Artificial Sequence
  siRNA antisense strand against APCS
uggguauuguaggagaagagg

SEQ ID NO: 873 - RNA, 21 nt, Artificial Sequence
  siRNA antisense strand against APCS
ccuuggguauuguaggagaag

SEQ ID NO: 874 - RNA, 21 nt, Artificial Sequence
  siRNA antisense strand against APCS
gccuuggguauuguaggagaa

SEQ ID NO: 875 - RNA, 21 nt, Artificial Sequence
  siRNA antisense strand against APCS
ugccuuggguauuguaggaga

SEQ ID NO: 876 - RNA, 21 nt, Artificial Sequence
  siRNA antisense strand against APCS
cugccuuggguauuguaggag

SEQ ID NO: 877 - RNA, 21 nt, Artificial Sequence
  siRNA antisense strand against APCS
ccugccuuggguauuguagga

SEQ ID NO: 878 - RNA, 21 nt, Artificial Sequence
  siRNA antisense strand against APCS
aucccugccuuggguauugua

SEQ ID NO: 879 - RNA, 21 nt, Artificial Sequence
  siRNA antisense strand against APCS
uuaucccugccuuggguauug

SEQ ID NO: 880 - RNA, 21 nt, Artificial Sequence
  siRNA antisense strand against APCS
auuaucccugccuuggguauu

SEQ ID NO: 881 - RNA, 21 nt, Artificial Sequence
  siRNA antisense strand against APCS
cucauuaucccugccuugggu

SEQ ID NO: 882 - RNA, 21 nt, Artificial Sequence
  siRNA antisense strand against APCS
agcucauuaucccugccuugg

SEQ ID NO: 883 - RNA, 21 nt, Artificial Sequence
  siRNA antisense strand against APCS
uagcucauuaucccugccuug

SEQ ID NO: 884 - RNA, 21 nt, Artificial Sequence
  siRNA antisense strand against APCS
aguagcucauuaucccugccu

SEQ ID NO: 885 - RNA, 21 nt, Artificial Sequence
  siRNA antisense strand against APCS
uaguagcucauuaucccugcc

SEQ ID NO: 886 - RNA, 21 nt, Artificial Sequence
  siRNA antisense strand against APCS
cuaguagcucauuaucccugc

SEQ ID NO: 887 - RNA, 21 nt, Artificial Sequence
  siRNA antisense strand against APCS
acuaguagcucauuaucccug

SEQ ID NO: 888 - RNA, 21 nt, Artificial Sequence
  siRNA antisense strand against APCS
aacuaguagcucauuaucccu

SEQ ID NO: 889 - RNA, 21 nt, Artificial Sequence
  siRNA antisense strand against APCS
aaacuaguagcucauuauccc

SEQ ID NO: 890 - RNA, 21 nt, Artificial Sequence
  siRNA antisense strand against APCS
uaaacuaguagcucauuaucc

SEQ ID NO: 891 - RNA, 21 nt, Artificial Sequence
  siRNA antisense strand against APCS
auaaacuaguagcucauuauc

SEQ ID NO: 892 - RNA, 21 nt, Artificial Sequence
  siRNA antisense strand against APCS
uuauaaacuaguagcucauua

SEQ ID NO: 893 - RNA, 21 nt, Artificial Sequence
  siRNA antisense strand against APCS
uuuauaaacuaguagcucauu

SEQ ID NO: 894 - RNA, 21 nt, Artificial Sequence
  siRNA antisense strand against APCS
cuuuauaaacuaguagcucau

SEQ ID NO: 895 - RNA, 21 nt, Artificial Sequence
  siRNA antisense strand against APCS
ucuuuauaaacuaguagcuca

SEQ ID NO: 896 - RNA, 21 nt, Artificial Sequence
  siRNA antisense strand against APCS
uucuuuauaaacuaguagcuc

SEQ ID NO: 897 - RNA, 21 nt, Artificial Sequence
  siRNA antisense strand against APCS
uuucuuuauaaacuaguagcu

SEQ ID NO: 898 - RNA, 21 nt, Artificial Sequence
  siRNA antisense strand against APCS
aacucuuucuuuauaaacuag

SEQ ID NO: 899 - RNA, 21 nt, Artificial Sequence
  siRNA antisense strand against APCS
uacucuccaacucuuucuuua

SEQ ID NO: 900 - RNA, 21 nt, Artificial Sequence
  siRNA antisense strand against APCS
auacucuccaacucuuucuuu

SEQ ID NO: 901 - RNA, 21 nt, Artificial Sequence
  siRNA antisense strand against APCS
uauacucuccaacucuuucuu

SEQ ID NO: 902 - RNA, 21 nt, Artificial Sequence
  siRNA antisense strand against APCS
acuauacucuccaacucuuuc

SEQ ID NO: 903 - RNA, 21 nt, Artificial Sequence
  siRNA antisense strand against APCS
gacuauacucuccaacucuuu

SEQ ID NO: 904 - RNA, 21 nt, Artificial Sequence
  siRNA antisense strand against APCS
agacuauacucuccaacucuu

SEQ ID NO: 905 - RNA, 21 nt, Artificial Sequence
  siRNA antisense strand against APCS
uagacuauacucuccaacucu

SEQ ID NO: 906 - RNA, 21 nt, Artificial Sequence
  siRNA antisense strand against APCS
auagacuauacucuccaacuc

SEQ ID NO: 907 - RNA, 21 nt, Artificial Sequence
  siRNA antisense strand against APCS
uauagacuauacucuccaacu

SEQ ID NO: 908 - RNA, 21 nt, Artificial Sequence
  siRNA antisense strand against APCS
guauagacuauacucuccaac

SEQ ID NO: 909 - RNA, 21 nt, Artificial Sequence
  siRNA antisense strand against APCS
uguauagacuauacucuccaa

SEQ ID NO: 910 - RNA, 21 nt, Artificial Sequence
  siRNA antisense strand against APCS
auguauagacuauacucucca

SEQ ID NO: 911 - RNA, 21 nt, Artificial Sequence
  siRNA antisense strand against APCS
aauguauagacuauacucucc

SEQ ID NO: 912 - RNA, 21 nt, Artificial Sequence
  siRNA antisense strand against APCS
caauguauagacuauacucuc

SEQ ID NO: 913 - RNA, 21 nt, Artificial Sequence
  siRNA antisense strand against APCS
ccaauguauagacuauacucu

SEQ ID NO: 914 - RNA, 21 nt, Artificial Sequence
  siRNA antisense strand against APCS
uccaauguauagacuauacuc

SEQ ID NO: 915 - RNA, 21 nt, Artificial Sequence
  siRNA antisense strand against APCS
ugucuuccaauguauagacua

SEQ ID NO: 916 - RNA, 21 nt, Artificial Sequence
  siRNA antisense strand against APCS
ugugucuuccaauguauagac

SEQ ID NO: 917 - RNA, 21 nt, Artificial Sequence
  siRNA antisense strand against APCS
uugugucuuccaauguauaga

SEQ ID NO: 918 - RNA, 21 nt, Artificial Sequence
  siRNA antisense strand against APCS
uuugugucuuccaauguauag

SEQ ID NO: 919 - RNA, 21 nt, Artificial Sequence
  siRNA antisense strand against APCS
acuuugugucuuccaauguau

SEQ ID NO: 920 - RNA, 21 nt, Artificial Sequence
  siRNA antisense strand against APCS
aacuuugugucuuccaaugua

SEQ ID NO: 921 - RNA, 21 nt, Artificial Sequence
  siRNA antisense strand against APCS
uaacuuugugucuuccaaugu

SEQ ID NO: 922 - RNA, 21 nt, Artificial Sequence
  siRNA antisense strand against APCS
uguaacuuugugucuuccaau

SEQ ID NO: 923 - RNA, 21 nt, Artificial Sequence
  siRNA antisense strand against APCS
auguaacuuugugucuuccaa

SEQ ID NO: 924 - RNA, 21 nt, Artificial Sequence
  siRNA antisense strand against APCS
gauguaacuuugugucuucca

SEQ ID NO: 925 - RNA, 21 nt, Artificial Sequence
  siRNA antisense strand against APCS
ggauguaacuuugugucuucc

SEQ ID NO: 926 - RNA, 21 nt, Artificial Sequence
  siRNA antisense strand against APCS
uggauguaacuuugugucuuc

SEQ ID NO: 927 - RNA, 21 nt, Artificial Sequence
  siRNA antisense strand against APCS
uuggauguaacuuugugucuu

SEQ ID NO: 928 - RNA, 21 nt, Artificial Sequence
  siRNA antisense strand against APCS
uuuggauguaacuuugugucu

SEQ ID NO: 929 - RNA, 21 nt, Artificial Sequence
  siRNA antisense strand against APCS
cuuuggauguaacuuuguguc

SEQ ID NO: 930 - RNA, 21 nt, Artificial Sequence
  siRNA antisense strand against APCS
aacuuuggauguaacuuugug

SEQ ID NO: 931 - RNA, 21 nt, Artificial Sequence
  siRNA antisense strand against APCS
uaacuuuggauguaacuuugu

SEQ ID NO: 932 - RNA, 21 nt, Artificial Sequence
  siRNA antisense strand against APCS
auaacuuuggauguaacuuug

SEQ ID NO: 933 - RNA, 21 nt, Artificial Sequence
  siRNA antisense strand against APCS
gauaacuuuggauguaacuuu

SEQ ID NO: 934 - RNA, 21 nt, Artificial Sequence
  siRNA antisense strand against APCS
cgauaacuuuggauguaacuu

SEQ ID NO: 935 - RNA, 21 nt, Artificial Sequence
  siRNA antisense strand against APCS
ucgauaacuuuggauguaacu

SEQ ID NO: 936 - RNA, 21 nt, Artificial Sequence
  siRNA antisense strand against APCS
uucgauaacuuuggauguaac

SEQ ID NO: 937 - RNA, 21 nt, Artificial Sequence
  siRNA antisense strand against APCS
uuucgauaacuuuggauguaa

SEQ ID NO: 938 - RNA, 21 nt, Artificial Sequence
  siRNA antisense strand against APCS
uuuucgauaacuuuggaugua

SEQ ID NO: 939 - RNA, 21 nt, Artificial Sequence
  siRNA antisense strand against APCS
cuuuucgauaacuuuggaugu

SEQ ID NO: 940 - RNA, 21 nt, Artificial Sequence
  siRNA antisense strand against APCS
acuuuucgauaacuuuggaug

SEQ ID NO: 941 - RNA, 21 nt, Artificial Sequence
  siRNA antisense strand against APCS
aacuuuucgauaacuuuggau

SEQ ID NO: 942 - RNA, 21 nt, Artificial Sequence
  siRNA antisense strand against APCS
gaacuuuucgauaacuuugga

SEQ ID NO: 943 - RNA, 21 nt, Artificial Sequence
  siRNA antisense strand against APCS
uggagccgggaacuuuucgau

SEQ ID NO: 944 - RNA, 21 nt, Artificial Sequence
  siRNA antisense strand against APCS
acuggagccgggaacuuuucg

SEQ ID NO: 945 - RNA, 21 nt, Artificial Sequence
  siRNA antisense strand against APCS
gaugugcacuggagccgggaa

SEQ ID NO: 946 - RNA, 21 nt, Artificial Sequence
  siRNA antisense strand against APCS
cagaugugcacuggagccggg

SEQ ID NO: 947 - RNA, 21 nt, Artificial Sequence
  siRNA antisense strand against APCS
acagaugugcacuggagccgg

SEQ ID NO: 948 - RNA, 21 nt, Artificial Sequence
  siRNA antisense strand against APCS
cacagaugugcacuggagccg

SEQ ID NO: 949 - RNA, 21 nt, Artificial Sequence
  siRNA antisense strand against APCS
acacagaugugcacuggagcc

SEQ ID NO: 950 - RNA, 21 nt, Artificial Sequence
  siRNA antisense strand against APCS
ucacacagaugugcacuggag

SEQ ID NO: 951 - RNA, 21 nt, Artificial Sequence
  siRNA antisense strand against APCS
agcucacacagaugugcacug

SEQ ID NO: 952 - RNA, 21 nt, Artificial Sequence
  siRNA antisense strand against APCS
ccagcucacacagaugugcac

SEQ ID NO: 953 - RNA, 21 nt, Artificial Sequence
  siRNA antisense strand against APCS
ucccagcucacacagaugugc

SEQ ID NO: 954 - RNA, 21 nt, Artificial Sequence
  siRNA antisense strand against APCS
acucccagcucacacagaugu

SEQ ID NO: 955 - RNA, 21 nt, Artificial Sequence
  siRNA antisense strand against APCS
aggacucccagcucacacaga

SEQ ID NO: 956 - RNA, 21 nt, Artificial Sequence
  siRNA antisense strand against APCS
gaggacucccagcucacacag

SEQ ID NO: 957 - RNA, 21 nt, Artificial Sequence
  siRNA antisense strand against APCS
cugaugaggacucccagcuca

SEQ ID NO: 958 - RNA, 21 nt, Artificial Sequence
  siRNA antisense strand against APCS
ccugaugaggacucccagcuc

SEQ ID NO: 959 - RNA, 21 nt, Artificial Sequence
  siRNA antisense strand against APCS
accugaugaggacucccagcu

SEQ ID NO: 960 - RNA, 21 nt, Artificial Sequence
  siRNA antisense strand against APCS
uaccugaugaggacucccagc

SEQ ID NO: 961 - RNA, 21 nt, Artificial Sequence
  siRNA antisense strand against APCS
auaccugaugaggacucccag

SEQ ID NO: 962 - RNA, 21 nt, Artificial Sequence
  siRNA antisense strand against APCS
aauaccugaugaggacuccca

SEQ ID NO: 963 - RNA, 21 nt, Artificial Sequence
  siRNA antisense strand against APCS
caauaccugaugaggacuccc

SEQ ID NO: 964 - RNA, 21 nt, Artificial Sequence
  siRNA antisense strand against APCS
agcaauaccugaugaggacuc

SEQ ID NO: 965 - RNA, 21 nt, Artificial Sequence
  siRNA antisense strand against APCS
cagcaauaccugaugaggacu

SEQ ID NO: 966 - RNA, 21 nt, Artificial Sequence
  siRNA antisense strand against APCS
ucagcaauaccugaugaggac

SEQ ID NO: 967 - RNA, 21 nt, Artificial Sequence
  siRNA antisense strand against APCS
uucagcaauaccugaugagga

SEQ ID NO: 968 - RNA, 21 nt, Artificial Sequence
  siRNA antisense strand against APCS
auucagcaauaccugaugagg

SEQ ID NO: 969 - RNA, 21 nt, Artificial Sequence
  siRNA antisense strand against APCS
aauucagcaauaccugaugag

SEQ ID NO: 970 - RNA, 21 nt, Artificial Sequence
  siRNA antisense strand against APCS
aaauucagcaauaccugauga

SEQ ID NO: 971 - RNA, 21 nt, Artificial Sequence
  siRNA antisense strand against APCS
aaaauucagcaauaccugaug

SEQ ID NO: 972 - RNA, 21 nt, Artificial Sequence
  siRNA antisense strand against APCS
caaaauucagcaauaccugau

SEQ ID NO: 973 - RNA, 21 nt, Artificial Sequence
  siRNA antisense strand against APCS
ccaaaauucagcaauaccuga

SEQ ID NO: 974 - RNA, 21 nt, Artificial Sequence
  siRNA antisense strand against APCS
uccaaaauucagcaauaccug

SEQ ID NO: 975 - RNA, 21 nt, Artificial Sequence
  siRNA antisense strand against APCS
auccaaaauucagcaauaccu

SEQ ID NO: 976 - RNA, 21 nt, Artificial Sequence
  siRNA antisense strand against APCS
ugauccaaaauucagcaauac

SEQ ID NO: 977 - RNA, 21 nt, Artificial Sequence
  siRNA antisense strand against APCS
auugauccaaaauucagcaau

SEQ ID NO: 978 - RNA, 21 nt, Artificial Sequence
  siRNA antisense strand against APCS
cauugauccaaaauucagcaa

SEQ ID NO: 979 - RNA, 21 nt, Artificial Sequence
  siRNA antisense strand against APCS
ccauugauccaaaauucagca

SEQ ID NO: 980 - RNA, 21 nt, Artificial Sequence
  siRNA antisense strand against APCS
ucccauugauccaaaauucag

SEQ ID NO: 981 - RNA, 21 nt, Artificial Sequence
  siRNA antisense strand against APCS
aaaggugucccauugauccaa

SEQ ID NO: 982 - RNA, 21 nt, Artificial Sequence
  siRNA antisense strand against APCS
caccaaaggugucccauugau

SEQ ID NO: 983 - RNA, 21 nt, Artificial Sequence
  siRNA antisense strand against APCS
ucaccaaaggugucccauuga

SEQ ID NO: 984 - RNA, 21 nt, Artificial Sequence
  siRNA antisense strand against APCS
uucaccaaaggugucccauug

SEQ ID NO: 985 - RNA, 21 nt, Artificial Sequence
  siRNA antisense strand against APCS
uuucaccaaaggugucccauu

SEQ ID NO: 986 - RNA, 21 nt, Artificial Sequence
  siRNA antisense strand against APCS
uuuucaccaaaggugucccau

SEQ ID NO: 987 - RNA, 21 nt, Artificial Sequence
  siRNA antisense strand against APCS
uuuuucaccaaagguguccca

SEQ ID NO: 988 - RNA, 21 nt, Artificial Sequence
  siRNA antisense strand against APCS
acccuuuuucaccaaaggugu

SEQ ID NO: 989 - RNA, 21 nt, Artificial Sequence
  siRNA antisense strand against APCS
gacccuuuuucaccaaaggug

SEQ ID NO: 990 - RNA, 21 nt, Artificial Sequence
  siRNA antisense strand against APCS
agacccuuuuucaccaaaggu

SEQ ID NO: 991 - RNA, 21 nt, Artificial Sequence
  siRNA antisense strand against APCS
ucgcagacccuuuuucaccaa

SEQ ID NO: 992 - RNA, 21 nt, Artificial Sequence
  siRNA antisense strand against APCS
gucgcagacccuuuuucacca

SEQ ID NO: 993 - RNA, 21 nt, Artificial Sequence
  siRNA antisense strand against APCS
ugucgcagacccuuuuucacc

SEQ ID NO: 994 - RNA, 21 nt, Artificial Sequence
  siRNA antisense strand against APCS
cugucgcagacccuuuuucac

SEQ ID NO: 995 - RNA, 21 nt, Artificial Sequence
  siRNA antisense strand against APCS
acccugucgcagacccuuuuu

SEQ ID NO: 996 - RNA, 21 nt, Artificial Sequence
  siRNA antisense strand against APCS
aacccugucgcagacccuuuu

SEQ ID NO: 997 - RNA, 21 nt, Artificial Sequence
  siRNA antisense strand against APCS
uaacccugucgcagacccuuu

SEQ ID NO: 998 - RNA, 21 nt, Artificial Sequence
  siRNA antisense strand against APCS
guaacccugucgcagacccuu

SEQ ID NO: 999 - RNA, 21 nt, Artificial Sequence
  siRNA antisense strand against APCS
aguaacccugucgcagacccu

SEQ ID NO: 1000 - RNA, 21 nt, Artificial Sequence
  siRNA antisense strand against APCS
aaguaacccugucgcagaccc

SEQ ID NO: 1001 - RNA, 21 nt, Artificial Sequence
  siRNA antisense strand against APCS
aaaguaacccugucgcagacc

SEQ ID NO: 1002 - RNA, 21 nt, Artificial Sequence
  siRNA antisense strand against APCS
caaaguaacccugucgcagac

SEQ ID NO: 1003 - RNA, 21 nt, Artificial Sequence
  siRNA antisense strand against APCS
acaaaguaacccugucgcaga

SEQ ID NO: 1004 - RNA, 21 nt, Artificial Sequence
  siRNA antisense strand against APCS
uacaaaguaacccugucgcag

SEQ ID NO: 1005 - RNA, 21 nt, Artificial Sequence
  siRNA antisense strand against APCS
cuacaaaguaacccugucgca

SEQ ID NO: 1006 - RNA, 21 nt, Artificial Sequence
  siRNA antisense strand against APCS
ucuacaaaguaacccugucgc

SEQ ID NO: 1007 - RNA, 21 nt, Artificial Sequence
  siRNA antisense strand against APCS
uucuacaaaguaacccugucg

SEQ ID NO: 1008 - RNA, 21 nt, Artificial Sequence
  siRNA antisense strand against APCS
cuucuacaaaguaacccuguc

SEQ ID NO: 1009 - RNA, 21 nt, Artificial Sequence
  siRNA antisense strand against APCS
gcuucuacaaaguaacccugu

SEQ ID NO: 1010 - RNA, 21 nt, Artificial Sequence
  siRNA antisense strand against APCS
agcuucuacaaaguaacccug

SEQ ID NO: 1011 - RNA, 21 nt, Artificial Sequence
  siRNA antisense strand against APCS
gagcuucuacaaaguaacccu

SEQ ID NO: 1012 - RNA, 21 nt, Artificial Sequence
  siRNA antisense strand against APCS
ugagcuucuacaaaguaaccc

SEQ ID NO: 1013 - RNA, 21 nt, Artificial Sequence
  siRNA antisense strand against APCS
aaucuugggcugagcuucuac

SEQ ID NO: 1014 - RNA, 21 nt, Artificial Sequence
  siRNA antisense strand against APCS
caaucuugggcugagcuucua

SEQ ID NO: 1015 - RNA, 21 nt, Artificial Sequence
  siRNA antisense strand against APCS
acaaucuugggcugagcuucu

SEQ ID NO: 1016 - RNA, 21 nt, Artificial Sequence
  siRNA antisense strand against APCS
gacaaucuugggcugagcuuc

SEQ ID NO: 1017 - RNA, 21 nt, Artificial Sequence
  siRNA antisense strand against APCS
aggacaaucuugggcugagcu

SEQ ID NO: 1018 - RNA, 21 nt, Artificial Sequence
  siRNA antisense strand against APCS
cccaggacaaucuugggcuga

SEQ ID NO: 1019 - RNA, 21 nt, Artificial Sequence
  siRNA antisense strand against APCS
ugccccaggacaaucuugggc

SEQ ID NO: 1020 - RNA, 21 nt, Artificial Sequence
  siRNA antisense strand against APCS
cugccccaggacaaucuuggg

SEQ ID NO: 1021 - RNA, 21 nt, Artificial Sequence
  siRNA antisense strand against APCS
uccugccccaggacaaucuug

SEQ ID NO: 1022 - RNA, 21 nt, Artificial Sequence
  siRNA antisense strand against APCS
uuccugccccaggacaaucuu

SEQ ID NO: 1023 - RNA, 21 nt, Artificial Sequence
  siRNA antisense strand against APCS
uguuccugccccaggacaauc

SEQ ID NO: 1024 - RNA, 21 nt, Artificial Sequence
  siRNA antisense strand against APCS
uccuguuccugccccaggaca

SEQ ID NO: 1025 - RNA, 21 nt, Artificial Sequence
  siRNA antisense strand against APCS
aauccuguuccugccccagga

SEQ ID NO: 1026 - RNA, 21 nt, Artificial Sequence
  siRNA antisense strand against APCS
gaauccuguuccugccccagg

SEQ ID NO: 1027 - RNA, 21 nt, Artificial Sequence
  siRNA antisense strand against APCS
ggaauccuguuccugccccag

SEQ ID NO: 1028 - RNA, 21 nt, Artificial Sequence
  siRNA antisense strand against APCS
uaggaauccuguuccugcccc

SEQ ID NO: 1029 - RNA, 21 nt, Artificial Sequence
  siRNA antisense strand against APCS
auaggaauccuguuccugccc

SEQ ID NO: 1030 - RNA, 21 nt, Artificial Sequence
  siRNA antisense strand against APCS
cauaggaauccuguuccugcc

SEQ ID NO: 1031 - RNA, 21 nt, Artificial Sequence
  siRNA antisense strand against APCS
cccauaggaauccuguuccug

SEQ ID NO: 1032 - RNA, 21 nt, Artificial Sequence
  siRNA antisense strand against APCS
ccccauaggaauccuguuccu

SEQ ID NO: 1033 - RNA, 21 nt, Artificial Sequence
  siRNA antisense strand against APCS
gcccccauaggaauccuguuc

SEQ ID NO: 1034 - RNA, 21 nt, Artificial Sequence
  siRNA antisense strand against APCS
ugcccccauaggaauccuguu

SEQ ID NO: 1035 - RNA, 21 nt, Artificial Sequence
  siRNA antisense strand against APCS
cuugcccccauaggaauccug

SEQ ID NO: 1036 - RNA, 21 nt, Artificial Sequence
  siRNA antisense strand against APCS
acuugcccccauaggaauccu

SEQ ID NO: 1037 - RNA, 21 nt, Artificial Sequence
  siRNA antisense strand against APCS
aacuugcccccauaggaaucc

SEQ ID NO: 1038 - RNA, 21 nt, Artificial Sequence
  siRNA antisense strand against APCS
aaacuugcccccauaggaauc

SEQ ID NO: 1039 - RNA, 21 nt, Artificial Sequence
  siRNA antisense strand against APCS
caaacuugcccccauaggaau

SEQ ID NO: 1040 - RNA, 21 nt, Artificial Sequence
  siRNA antisense strand against APCS
ucaaacuugcccccauaggaa

SEQ ID NO: 1041 - RNA, 21 nt, Artificial Sequence
  siRNA antisense strand against APCS
aucaaacuugcccccauagga

SEQ ID NO: 1042 - RNA, 21 nt, Artificial Sequence
  siRNA antisense strand against APCS
uaucaaacuugcccccauagg

SEQ ID NO: 1043 - RNA, 21 nt, Artificial Sequence
  siRNA antisense strand against APCS
uccuaucaaacuugcccccau

SEQ ID NO: 1044 - RNA, 21 nt, Artificial Sequence
  siRNA antisense strand against APCS
cuccuaucaaacuugccccca

SEQ ID NO: 1045 - RNA, 21 nt, Artificial Sequence
  siRNA antisense strand against APCS
gcuccuaucaaacuugccccc

SEQ ID NO: 1046 - RNA, 21 nt, Artificial Sequence
  siRNA antisense strand against APCS
ggcuccuaucaaacuugcccc

SEQ ID NO: 1047 - RNA, 21 nt, Artificial Sequence
  siRNA antisense strand against APCS
uggcuccuaucaaacuugccc

SEQ ID NO: 1048 - RNA, 21 nt, Artificial Sequence
  siRNA antisense strand against APCS
cuggcuccuaucaaacuugcc

SEQ ID NO: 1049 - RNA, 21 nt, Artificial Sequence
  siRNA antisense strand against APCS
acuggcuccuaucaaacuugc

SEQ ID NO: 1050 - RNA, 21 nt, Artificial Sequence
  siRNA antisense strand against APCS
aaggacuggcuccuaucaaac

SEQ ID NO: 1051 - RNA, 21 nt, Artificial Sequence
  siRNA antisense strand against APCS
aaaggacuggcuccuaucaaa

SEQ ID NO: 1052 - RNA, 21 nt, Artificial Sequence
  siRNA antisense strand against APCS
caaaggacuggcuccuaucaa

SEQ ID NO: 1053 - RNA, 21 nt, Artificial Sequence
  siRNA antisense strand against APCS
acaaaggacuggcuccuauca

SEQ ID NO: 1054 - RNA, 21 nt, Artificial Sequence
  siRNA antisense strand against APCS
ccacaaaggacuggcuccuau

SEQ ID NO: 1055 - RNA, 21 nt, Artificial Sequence
  siRNA antisense strand against APCS
cccacaaaggacuggcuccua

SEQ ID NO: 1056 - RNA, 21 nt, Artificial Sequence
  siRNA antisense strand against APCS
ucccacaaaggacuggcuccu

SEQ ID NO: 1057 - RNA, 21 nt, Artificial Sequence
  siRNA antisense strand against APCS
cucccacaaaggacuggcucc

SEQ ID NO: 1058 - RNA, 21 nt, Artificial Sequence
  siRNA antisense strand against APCS
ucucccacaaaggacuggcuc

SEQ ID NO: 1059 - RNA, 21 nt, Artificial Sequence
  siRNA antisense strand against APCS
cucucccacaaaggacuggcu

SEQ ID NO: 1060 - RNA, 21 nt, Artificial Sequence
  siRNA antisense strand against APCS
ucucucccacaaaggacuggc

SEQ ID NO: 1061 - RNA, 21 nt, Artificial Sequence
  siRNA antisense strand against APCS
aucucucccacaaaggacugg

SEQ ID NO: 1062 - RNA, 21 nt, Artificial Sequence
  siRNA antisense strand against APCS
aaucucucccacaaaggacug

SEQ ID NO: 1063 - RNA, 21 nt, Artificial Sequence
  siRNA antisense strand against APCS
caaucucucccacaaaggacu

SEQ ID NO: 1064 - RNA, 21 nt, Artificial Sequence
  siRNA antisense strand against APCS
ccaaucucucccacaaaggac

SEQ ID NO: 1065 - RNA, 21 nt, Artificial Sequence
  siRNA antisense strand against APCS
cccaaucucucccacaaagga

SEQ ID NO: 1066 - RNA, 21 nt, Artificial Sequence
  siRNA antisense strand against APCS
uccccaaucucucccacaaag

SEQ ID NO: 1067 - RNA, 21 nt, Artificial Sequence
  siRNA antisense strand against APCS
auccccaaucucucccacaaa

SEQ ID NO: 1068 - RNA, 21 nt, Artificial Sequence
  siRNA antisense strand against APCS
aauccccaaucucucccacaa

SEQ ID NO: 1069 - RNA, 21 nt, Artificial Sequence
  siRNA antisense strand against APCS
aaauccccaaucucucccaca

SEQ ID NO: 1070 - RNA, 21 nt, Artificial Sequence
  siRNA antisense strand against APCS
caaauccccaaucucucccac

SEQ ID NO: 1071 - RNA, 21 nt, Artificial Sequence
  siRNA antisense strand against APCS
acaaauccccaaucucuccca

SEQ ID NO: 1072 - RNA, 21 nt, Artificial Sequence
  siRNA antisense strand against APCS
uacaaauccccaaucucuccc

SEQ ID NO: 1073 - RNA, 21 nt, Artificial Sequence
  siRNA antisense strand against APCS
guacaaauccccaaucucucc

SEQ ID NO: 1074 - RNA, 21 nt, Artificial Sequence
  siRNA antisense strand against APCS
uguacaaauccccaaucucuc

SEQ ID NO: 1075 - RNA, 21 nt, Artificial Sequence
  siRNA antisense strand against APCS
auguacaaauccccaaucucu

SEQ ID NO: 1076 - RNA, 21 nt, Artificial Sequence
  siRNA antisense strand against APCS
cccacauguacaaauccccaa

SEQ ID NO: 1077 - RNA, 21 nt, Artificial Sequence
  siRNA antisense strand against APCS
ucccacauguacaaaucccca

SEQ ID NO: 1078 - RNA, 21 nt, Artificial Sequence
  siRNA antisense strand against APCS
gucccacauguacaaaucccc

SEQ ID NO: 1079 - RNA, 21 nt, Artificial Sequence
  siRNA antisense strand against APCS
agucccacauguacaaauccc

SEQ ID NO: 1080 - RNA, 21 nt, Artificial Sequence
  siRNA antisense strand against APCS
acagagucccacauguacaaa

SEQ ID NO: 1081 - RNA, 21 nt, Artificial Sequence
  siRNA antisense strand against APCS
cacagagucccacauguacaa

SEQ ID NO: 1082 - RNA, 21 nt, Artificial Sequence
  siRNA antisense strand against APCS
agcacagagucccacauguac

SEQ ID NO: 1083 - RNA, 21 nt, Artificial Sequence
  siRNA antisense strand against APCS
gggggcagcacagagucccac

SEQ ID NO: 1084 - RNA, 21 nt, Artificial Sequence
  siRNA antisense strand against APCS
ugggggcagcacagaguccca

SEQ ID NO: 1085 - RNA, 21 nt, Artificial Sequence
  siRNA antisense strand against APCS
ucugggggcagcacagagucc

SEQ ID NO: 1086 - RNA, 21 nt, Artificial Sequence
  siRNA antisense strand against APCS
uucugggggcagcacagaguc

SEQ ID NO: 1087 - RNA, 21 nt, Artificial Sequence
  siRNA antisense strand against APCS
uuuucugggggcagcacagag

SEQ ID NO: 1088 - RNA, 21 nt, Artificial Sequence
  siRNA antisense strand against APCS
auuuucugggggcagcacaga

SEQ ID NO: 1089 - RNA, 21 nt, Artificial Sequence
  siRNA antisense strand against APCS
uauuuucugggggcagcacag

SEQ ID NO: 1090 - RNA, 21 nt, Artificial Sequence
  siRNA antisense strand against APCS
gauauuuucugggggcagcac

SEQ ID NO: 1091 - RNA, 21 nt, Artificial Sequence
  siRNA antisense strand against APCS
acaggauauuuucugggggca

SEQ ID NO: 1092 - RNA, 21 nt, Artificial Sequence
  siRNA antisense strand against APCS
agacaggauauuuucuggggg

SEQ ID NO: 1093 - RNA, 21 nt, Artificial Sequence
  siRNA antisense strand against APCS
cagacaggauauuuucugggg

SEQ ID NO: 1094 - RNA, 21 nt, Artificial Sequence
  siRNA antisense strand against APCS
gcagacaggauauuuucuggg

SEQ ID NO: 1095 - RNA, 21 nt, Artificial Sequence
  siRNA antisense strand against APCS
aggcagacaggauauuuucug

SEQ ID NO: 1096 - RNA, 21 nt, Artificial Sequence
  siRNA antisense strand against APCS
uaggcagacaggauauuuucu

SEQ ID NO: 1097 - RNA, 21 nt, Artificial Sequence
  siRNA antisense strand against APCS
auaggcagacaggauauuuuc

SEQ ID NO: 1098 - RNA, 21 nt, Artificial Sequence
  siRNA antisense strand against APCS
acccugauaggcagacaggau

SEQ ID NO: 1099 - RNA, 21 nt, Artificial Sequence
  siRNA antisense strand against APCS
uacccugauaggcagacagga

SEQ ID NO: 1100 - RNA, 21 nt, Artificial Sequence
  siRNA antisense strand against APCS
gguacccugauaggcagacag

SEQ ID NO: 1101 - RNA, 21 nt, Artificial Sequence
  siRNA antisense strand against APCS
agggguacccugauaggcaga

SEQ ID NO: 1102 - RNA, 21 nt, Artificial Sequence
  siRNA antisense strand against APCS
gagggguacccugauaggcag

SEQ ID NO: 1103 - RNA, 21 nt, Artificial Sequence
  siRNA antisense strand against APCS
agagggguacccugauaggca

SEQ ID NO: 1104 - RNA, 21 nt, Artificial Sequence
  siRNA antisense strand against APCS
gagagggguacccugauaggc

SEQ ID NO: 1105 - RNA, 21 nt, Artificial Sequence
  siRNA antisense strand against APCS
cagggagagggguacccugau

SEQ ID NO: 1106 - RNA, 21 nt, Artificial Sequence
  siRNA antisense strand against APCS
ggcagggagagggguacccug

SEQ ID NO: 1107 - RNA, 21 nt, Artificial Sequence
  siRNA antisense strand against APCS
uggcagggagagggguacccu

SEQ ID NO: 1108 - RNA, 21 nt, Artificial Sequence
  siRNA antisense strand against APCS
uuggcagggagagggguaccc

SEQ ID NO: 1109 - RNA, 21 nt, Artificial Sequence
  siRNA antisense strand against APCS
auuggcagggagagggguacc

SEQ ID NO: 1110 - RNA, 21 nt, Artificial Sequence
  siRNA antisense strand against APCS
auauuggcagggagaggggua

SEQ ID NO: 1111 - RNA, 21 nt, Artificial Sequence
  siRNA antisense strand against APCS
gauauuggcagggagaggggu

SEQ ID NO: 1112 - RNA, 21 nt, Artificial Sequence
  siRNA antisense strand against APCS
caguccaggauauuggcaggg

SEQ ID NO: 1113 - RNA, 21 nt, Artificial Sequence
  siRNA antisense strand against APCS
ugccaguccaggauauuggca

SEQ ID NO: 1114 - RNA, 21 nt, Artificial Sequence
  siRNA antisense strand against APCS
cugccaguccaggauauuggc

SEQ ID NO: 1115 - RNA, 21 nt, Artificial Sequence
  siRNA antisense strand against APCS
agagccugccaguccaggaua

SEQ ID NO: 1116 - RNA, 21 nt, Artificial Sequence
  siRNA antisense strand against APCS
cagagccugccaguccaggau

SEQ ID NO: 1117 - RNA, 21 nt, Artificial Sequence
  siRNA antisense strand against APCS
ucagagccugccaguccagga

SEQ ID NO: 1118 - RNA, 21 nt, Artificial Sequence
  siRNA antisense strand against APCS
uucagagccugccaguccagg

SEQ ID NO: 1119 - RNA, 21 nt, Artificial Sequence
  siRNA antisense strand against APCS
guucagagccugccaguccag

SEQ ID NO: 1120 - RNA, 21 nt, Artificial Sequence
  siRNA antisense strand against APCS
aguucagagccugccagucca

SEQ ID NO: 1121 - RNA, 21 nt, Artificial Sequence
  siRNA antisense strand against APCS
uaguucagagccugccagucc

SEQ ID NO: 1122 - RNA, 21 nt, Artificial Sequence
  siRNA antisense strand against APCS
auaguucagagccugccaguc

SEQ ID NO: 1123 - RNA, 21 nt, Artificial Sequence
  siRNA antisense strand against APCS
cauaguucagagccugccagu

SEQ ID NO: 1124 - RNA, 21 nt, Artificial Sequence
  siRNA antisense strand against APCS
ucauaguucagagccugccag

SEQ ID NO: 1125 - RNA, 21 nt, Artificial Sequence
  siRNA antisense strand against APCS
uucauaguucagagccugcca

SEQ ID NO: 1126 - RNA, 21 nt, Artificial Sequence
  siRNA antisense strand against APCS
uuucauaguucagagccugcc

SEQ ID NO: 1127 - RNA, 21 nt, Artificial Sequence
  siRNA antisense strand against APCS
auuucauaguucagagccugc

SEQ ID NO: 1128 - RNA, 21 nt, Artificial Sequence
  siRNA antisense strand against APCS
gauuucauaguucagagccug

SEQ ID NO: 1129 - RNA, 21 nt, Artificial Sequence
  siRNA antisense strand against APCS
ugauuucauaguucagagccu

SEQ ID NO: 1130 - RNA, 21 nt, Artificial Sequence
  siRNA antisense strand against APCS
cugauuucauaguucagagcc

SEQ ID NO: 1131 - RNA, 21 nt, Artificial Sequence
  siRNA antisense strand against APCS
ucugauuucauaguucagagc

SEQ ID NO: 1132 - RNA, 21 nt, Artificial Sequence
  siRNA antisense strand against APCS
uccucugauuucauaguucag

SEQ ID NO: 1133 - RNA, 21 nt, Artificial Sequence
  siRNA antisense strand against APCS
auccucugauuucauaguuca

SEQ ID NO: 1134 - RNA, 21 nt, Artificial Sequence
  siRNA antisense strand against APCS
uauccucugauuucauaguuc

SEQ ID NO: 1135 - RNA, 21 nt, Artificial Sequence
  siRNA antisense strand against APCS
auauccucugauuucauaguu

SEQ ID NO: 1136 - RNA, 21 nt, Artificial Sequence
  siRNA antisense strand against APCS
cauauccucugauuucauagu

SEQ ID NO: 1137 - RNA, 21 nt, Artificial Sequence
  siRNA antisense strand against APCS
gacauauccucugauuucaua

SEQ ID NO: 1138 - RNA, 21 nt, Artificial Sequence
  siRNA antisense strand against APCS
ugacauauccucugauuucau

SEQ ID NO: 1139 - RNA, 21 nt, Artificial Sequence
  siRNA antisense strand against APCS
augacauauccucugauuuca

SEQ ID NO: 1140 - RNA, 21 nt, Artificial Sequence
  siRNA antisense strand against APCS
gaugacauauccucugauuuc

SEQ ID NO: 1141 - RNA, 21 nt, Artificial Sequence
  siRNA antisense strand against APCS
gaugaugacauauccucugau

SEQ ID NO: 1142 - RNA, 21 nt, Artificial Sequence
  siRNA antisense strand against APCS
ugaugaugacauauccucuga

SEQ ID NO: 1143 - RNA, 21 nt, Artificial Sequence
  siRNA antisense strand against APCS
uugaugaugacauauccucug

SEQ ID NO: 1144 - RNA, 21 nt, Artificial Sequence
  siRNA antisense strand against APCS
uuugaugaugacauauccucu

SEQ ID NO: 1145 - RNA, 21 nt, Artificial Sequence
  siRNA antisense strand against APCS
guuugaugaugacauauccuc

SEQ ID NO: 1146 - RNA, 21 nt, Artificial Sequence
  siRNA antisense strand against APCS
gguuugaugaugacauauccu

SEQ ID NO: 1147 - RNA, 21 nt, Artificial Sequence
  siRNA antisense strand against APCS
aaggguuugaugaugacauau

SEQ ID NO: 1148 - RNA, 21 nt, Artificial Sequence
  siRNA antisense strand against APCS
caccaaggguuugaugaugac

SEQ ID NO: 1149 - RNA, 21 nt, Artificial Sequence
  siRNA antisense strand against APCS
cacaccaaggguuugaugaug

SEQ ID NO: 1150 - RNA, 21 nt, Artificial Sequence
  siRNA antisense strand against APCS
ucagacccacaccaaggguuu

SEQ ID NO: 1151 - RNA, 21 nt, Artificial Sequence
  siRNA antisense strand against APCS
cucagacccacaccaaggguu

SEQ ID NO: 1152 - RNA, 21 nt, Artificial Sequence
  siRNA antisense strand against APCS
ccucagacccacaccaagggu

SEQ ID NO: 1153 - RNA, 21 nt, Artificial Sequence
  siRNA antisense strand against APCS
accucagacccacaccaaggg

SEQ ID NO: 1154 - RNA, 21 nt, Artificial Sequence
  siRNA antisense strand against APCS
agaccucagacccacaccaag

SEQ ID NO: 1155 - RNA, 21 nt, Artificial Sequence
  siRNA antisense strand against APCS
aagaccucagacccacaccaa

SEQ ID NO: 1156 - RNA, 21 nt, Artificial Sequence
  siRNA antisense strand against APCS
caagaccucagacccacacca

SEQ ID NO: 1157 - RNA, 21 nt, Artificial Sequence
  siRNA antisense strand against APCS
ucaagaccucagacccacacc

SEQ ID NO: 1158 - RNA, 21 nt, Artificial Sequence
  siRNA antisense strand against APCS
gucaagaccucagacccacac

SEQ ID NO: 1159 - RNA, 21 nt, Artificial Sequence
  siRNA antisense strand against APCS
gagucaagaccucagacccac

SEQ ID NO: 1160 - RNA, 21 nt, Artificial Sequence
  siRNA antisense strand against APCS
ugagucaagaccucagaccca

SEQ ID NO: 1161 - RNA, 21 nt, Artificial Sequence
  siRNA antisense strand against APCS
uugagucaagaccucagaccc

SEQ ID NO: 1162 - RNA, 21 nt, Artificial Sequence
  siRNA antisense strand against APCS
cguugagucaagaccucagac

SEQ ID NO: 1163 - RNA, 21 nt, Artificial Sequence
  siRNA antisense strand against APCS
ucguugagucaagaccucaga

SEQ ID NO: 1164 - RNA, 21 nt, Artificial Sequence
  siRNA antisense strand against APCS
cucguugagucaagaccucag

SEQ ID NO: 1165 - RNA, 21 nt, Artificial Sequence
  siRNA antisense strand against APCS
ucucguugagucaagaccuca

SEQ ID NO: 1166 - RNA, 21 nt, Artificial Sequence
  siRNA antisense strand against APCS
cucucguugagucaagaccuc

SEQ ID NO: 1167 - RNA, 21 nt, Artificial Sequence
  siRNA antisense strand against APCS
gcucucguugagucaagaccu

SEQ ID NO: 1168 - RNA, 21 nt, Artificial Sequence
  siRNA antisense strand against APCS
ugcucucguugagucaagacc

SEQ ID NO: 1169 - RNA, 21 nt, Artificial Sequence
  siRNA antisense strand against APCS
gugcucucguugagucaagac

SEQ ID NO: 1170 - RNA, 21 nt, Artificial Sequence
  siRNA antisense strand against APCS
agugcucucguugagucaaga

SEQ ID NO: 1171 - RNA, 21 nt, Artificial Sequence
  siRNA antisense strand against APCS
aagugcucucguugagucaag

SEQ ID NO: 1172 - RNA, 21 nt, Artificial Sequence
  siRNA antisense strand against APCS
caagugcucucguugagucaa

SEQ ID NO: 1173 - RNA, 21 nt, Artificial Sequence
  siRNA antisense strand against APCS
ucaagugcucucguugaguca

SEQ ID NO: 1174 - RNA, 21 nt, Artificial Sequence
  siRNA antisense strand against APCS
uucaagugcucucguugaguc

SEQ ID NO: 1175 - RNA, 21 nt, Artificial Sequence
  siRNA antisense strand against APCS
uuucaagugcucucguugagu

SEQ ID NO: 1176 - RNA, 21 nt, Artificial Sequence
  siRNA antisense strand against APCS
uuuucaagugcucucguugag

SEQ ID NO: 1177 - RNA, 21 nt, Artificial Sequence
  siRNA antisense strand against APCS
auuuucaagugcucucguuga

SEQ ID NO: 1178 - RNA, 21 nt, Artificial Sequence
  siRNA antisense strand against APCS
cauuuucaagugcucucguug

SEQ ID NO: 1179 - RNA, 21 nt, Artificial Sequence
  siRNA antisense strand against APCS
ucauuuucaagugcucucguu

SEQ ID NO: 1180 - RNA, 21 nt, Artificial Sequence
  siRNA antisense strand against APCS
uucauuuucaagugcucucgu

SEQ ID NO: 1181 - RNA, 21 nt, Artificial Sequence
  siRNA antisense strand against APCS
uuucauuuucaagugcucucg

SEQ ID NO: 1182 - RNA, 21 nt, Artificial Sequence
  siRNA antisense strand against APCS
auuucauuuucaagugcucuc

SEQ ID NO: 1183 - RNA, 21 nt, Artificial Sequence
  siRNA antisense strand against APCS
cauuucauuuucaagugcucu

SEQ ID NO: 1184 - RNA, 21 nt, Artificial Sequence
  siRNA antisense strand against APCS
ucauuucauuuucaagugcuc

SEQ ID NO: 1185 - RNA, 21 nt, Artificial Sequence
  siRNA antisense strand against APCS
gucauuucauuuucaagugcu

SEQ ID NO: 1186 - RNA, 21 nt, Artificial Sequence
  siRNA antisense strand against APCS
agucauuucauuuucaagugc

SEQ ID NO: 1187 - RNA, 21 nt, Artificial Sequence
  siRNA antisense strand against APCS
cagucauuucauuuucaagug

SEQ ID NO: 1188 - RNA, 21 nt, Artificial Sequence
  siRNA antisense strand against APCS
acagucauuucauuuucaagu

SEQ ID NO: 1189 - RNA, 21 nt, Artificial Sequence
  siRNA antisense strand against APCS
gacagucauuucauuuucaag

SEQ ID NO: 1190 - RNA, 21 nt, Artificial Sequence
  siRNA antisense strand against APCS
agacagucauuucauuuucaa

SEQ ID NO: 1191 - RNA, 21 nt, Artificial Sequence
  siRNA antisense strand against APCS
uagacagucauuucauuuuca

SEQ ID NO: 1192 - RNA, 21 nt, Artificial Sequence
  siRNA antisense strand against APCS
uuagacagucauuucauuuuc

SEQ ID NO: 1193 - RNA, 21 nt, Artificial Sequence
  siRNA antisense strand against APCS
cuuagacagucauuucauuuu

SEQ ID NO: 1194 - RNA, 21 nt, Artificial Sequence
  siRNA antisense strand against APCS
ucuuagacagucauuucauuu

SEQ ID NO: 1195 - RNA, 21 nt, Artificial Sequence
  siRNA antisense strand against APCS
cucuuagacagucauuucauu

SEQ ID NO: 1196 - RNA, 21 nt, Artificial Sequence
  siRNA antisense strand against APCS
ucucuuagacagucauuucau

SEQ ID NO: 1197 - RNA, 21 nt, Artificial Sequence
  siRNA antisense strand against APCS
aucucuuagacagucauuuca

SEQ ID NO: 1198 - RNA, 21 nt, Artificial Sequence
  siRNA antisense strand against APCS
agaucucuuagacagucauuu

SEQ ID NO: 1199 - RNA, 21 nt, Artificial Sequence
  siRNA antisense strand against APCS
cagaucucuuagacagucauu

SEQ ID NO: 1200 - RNA, 21 nt, Artificial Sequence
  siRNA antisense strand against APCS
ccagaucucuuagacagucau

SEQ ID NO: 1201 - RNA, 21 nt, Artificial Sequence
  siRNA antisense strand against APCS
accagaucucuuagacaguca

SEQ ID NO: 1202 - RNA, 21 nt, Artificial Sequence
  siRNA antisense strand against APCS
gaccagaucucuuagacaguc

SEQ ID NO: 1203 - RNA, 21 nt, Artificial Sequence
  siRNA antisense strand against APCS
ugaccagaucucuuagacagu

SEQ ID NO: 1204 - RNA, 21 nt, Artificial Sequence
  siRNA antisense strand against APCS
uugaccagaucucuuagacag

SEQ ID NO: 1205 - RNA, 21 nt, Artificial Sequence
  siRNA antisense strand against APCS
uuugaccagaucucuuagaca

SEQ ID NO: 1206 - RNA, 21 nt, Artificial Sequence
  siRNA antisense strand against APCS
cuuugaccagaucucuuagac

SEQ ID NO: 1207 - RNA, 21 nt, Artificial Sequence
  siRNA antisense strand against APCS
gcuuugaccagaucucuuaga

SEQ ID NO: 1208 - RNA, 21 nt, Artificial Sequence
  siRNA antisense strand against APCS
ugcuuugaccagaucucuuag

SEQ ID NO: 1209 - RNA, 21 nt, Artificial Sequence
  siRNA antisense strand against APCS
uugcuuugaccagaucucuua

SEQ ID NO: 1210 - RNA, 21 nt, Artificial Sequence
  siRNA antisense strand against APCS
guugcuuugaccagaucucuu

SEQ ID NO: 1211 - RNA, 21 nt, Artificial Sequence
  siRNA antisense strand against APCS
aguugcuuugaccagaucucu

SEQ ID NO: 1212 - RNA, 21 nt, Artificial Sequence
  siRNA antisense strand against APCS
caguugcuuugaccagaucuc

SEQ ID NO: 1213 - RNA, 21 nt, Artificial Sequence
  siRNA antisense strand against APCS
ccaguugcuuugaccagaucu

SEQ ID NO: 1214 - RNA, 21 nt, Artificial Sequence
  siRNA antisense strand against APCS
uccaguugcuuugaccagauc

SEQ ID NO: 1215 - RNA, 21 nt, Artificial Sequence
  siRNA antisense strand against APCS
auccaguugcuuugaccagau

SEQ ID NO: 1216 - RNA, 21 nt, Artificial Sequence
  siRNA antisense strand against APCS
uauccaguugcuuugaccaga

SEQ ID NO: 1217 - RNA, 21 nt, Artificial Sequence
  siRNA antisense strand against APCS
guauccaguugcuuugaccag

SEQ ID NO: 1218 - RNA, 21 nt, Artificial Sequence
  siRNA antisense strand against APCS
aguauccaguugcuuugacca

SEQ ID NO: 1219 - RNA, 21 nt, Artificial Sequence
  siRNA antisense strand against APCS
uaguauccaguugcuuugacc

SEQ ID NO: 1220 - RNA, 21 nt, Artificial Sequence
  siRNA antisense strand against APCS
cuaguauccaguugcuuugac

SEQ ID NO: 1221 - RNA, 21 nt, Artificial Sequence
  siRNA antisense strand against APCS
ucuaguauccaguugcuuuga

SEQ ID NO: 1222 - RNA, 21 nt, Artificial Sequence
  siRNA antisense strand against APCS
aucuaguauccaguugcuuug

SEQ ID NO: 1223 - RNA, 21 nt, Artificial Sequence
  siRNA antisense strand against APCS
gaucuaguauccaguugcuuu

SEQ ID NO: 1224 - RNA, 21 nt, Artificial Sequence
  siRNA antisense strand against APCS
agaucuaguauccaguugcuu

SEQ ID NO: 1225 - RNA, 21 nt, Artificial Sequence
  siRNA antisense strand against APCS
aagaucuaguauccaguugcu

SEQ ID NO: 1226 - RNA, 21 nt, Artificial Sequence
  siRNA antisense strand against APCS
uaagaucuaguauccaguugc

SEQ ID NO: 1227 - RNA, 21 nt, Artificial Sequence
  siRNA antisense strand against APCS
guaagaucuaguauccaguug

SEQ ID NO: 1228 - RNA, 21 nt, Artificial Sequence
  siRNA antisense strand against APCS
uguaagaucuaguauccaguu

SEQ ID NO: 1229 - RNA, 21 nt, Artificial Sequence
  siRNA antisense strand against APCS
auguaagaucuaguauccagu

SEQ ID NO: 1230 - RNA, 21 nt, Artificial Sequence
  siRNA antisense strand against APCS
gauguaagaucuaguauccag

SEQ ID NO: 1231 - RNA, 21 nt, Artificial Sequence
  siRNA antisense strand against APCS
agauguaagaucuaguaucca

SEQ ID NO: 1232 - RNA, 21 nt, Artificial Sequence
  siRNA antisense strand against APCS
cagauguaagaucuaguaucc

SEQ ID NO: 1233 - RNA, 21 nt, Artificial Sequence
  siRNA antisense strand against APCS
ugcagauguaagaucuaguau

SEQ ID NO: 1234 - RNA, 21 nt, Artificial Sequence
  siRNA antisense strand against APCS
cugcagauguaagaucuagua

SEQ ID NO: 1235 - RNA, 21 nt, Artificial Sequence
  siRNA antisense strand against APCS
agcugcagauguaagaucuag

SEQ ID NO: 1236 - RNA, 21 nt, Artificial Sequence
  siRNA antisense strand against APCS
gagcugcagauguaagaucua

SEQ ID NO: 1237 - RNA, 21 nt, Artificial Sequence
  siRNA antisense strand against APCS
agagcugcagauguaagaucu

SEQ ID NO: 1238 - RNA, 21 nt, Artificial Sequence
  siRNA antisense strand against APCS
aagagcugcagauguaagauc

SEQ ID NO: 1239 - RNA, 21 nt, Artificial Sequence
  siRNA antisense strand against APCS
aaagagcugcagauguaagau

SEQ ID NO: 1240 - RNA, 21 nt, Artificial Sequence
  siRNA antisense strand against APCS
gaaagagcugcagauguaaga

SEQ ID NO: 1241 - RNA, 21 nt, Artificial Sequence
  siRNA antisense strand against APCS
agaaagagcugcagauguaag

SEQ ID NO: 1242 - RNA, 21 nt, Artificial Sequence
  siRNA antisense strand against APCS
aagaaagagcugcagauguaa

SEQ ID NO: 1243 - RNA, 21 nt, Artificial Sequence
  siRNA antisense strand against APCS
gaagaaagagcugcagaugua

SEQ ID NO: 1244 - RNA, 21 nt, Artificial Sequence
  siRNA antisense strand against APCS
agaagaaagagcugcagaugu

SEQ ID NO: 1245 - RNA, 21 nt, Artificial Sequence
  siRNA antisense strand against APCS
aagaagaaagagcugcagaug

SEQ ID NO: 1246 - RNA, 21 nt, Artificial Sequence
  siRNA antisense strand against APCS
aaagaagaaagagcugcagau

SEQ ID NO: 1247 - RNA, 21 nt, Artificial Sequence
  siRNA antisense strand against APCS
caaagaagaaagagcugcaga

SEQ ID NO: 1248 - RNA, 21 nt, Artificial Sequence
  siRNA antisense strand against APCS
ucaaagaagaaagagcugcag

SEQ ID NO: 1249 - RNA, 21 nt, Artificial Sequence
  siRNA antisense strand against APCS
uucaaagaagaaagagcugca

SEQ ID NO: 1250 - RNA, 21 nt, Artificial Sequence
  siRNA antisense strand against APCS
auucaaagaagaaagagcugc

SEQ ID NO: 1251 - RNA, 21 nt, Artificial Sequence
  siRNA antisense strand against APCS
aauucaaagaagaaagagcug

SEQ ID NO: 1252 - RNA, 21 nt, Artificial Sequence
  siRNA antisense strand against APCS
aaauucaaagaagaaagagcu

SEQ ID NO: 1253 - RNA, 21 nt, Artificial Sequence
  siRNA antisense strand against APCS
gaaauucaaagaagaaagagc

SEQ ID NO: 1254 - RNA, 21 nt, Artificial Sequence
  siRNA antisense strand against APCS
ggaaauucaaagaagaaagag

SEQ ID NO: 1255 - RNA, 21 nt, Artificial Sequence
  siRNA antisense strand against APCS
aggaaauucaaagaagaaaga

SEQ ID NO: 1256 - RNA, 21 nt, Artificial Sequence
  siRNA antisense strand against APCS
uaggaaauucaaagaagaaag

SEQ ID NO: 1257 - RNA, 21 nt, Artificial Sequence
  siRNA antisense strand against APCS
auaggaaauucaaagaagaaa

SEQ ID NO: 1258 - RNA, 21 nt, Artificial Sequence
  siRNA antisense strand against APCS
agauaggaaauucaaagaaga

SEQ ID NO: 1259 - RNA, 21 nt, Artificial Sequence
  siRNA antisense strand against APCS
cagauaggaaauucaaagaag

SEQ ID NO: 1260 - RNA, 21 nt, Artificial Sequence
  siRNA antisense strand against APCS
acagauaggaaauucaaagaa

SEQ ID NO: 1261 - RNA, 21 nt, Artificial Sequence
  siRNA antisense strand against APCS
uacagauaggaaauucaaaga

SEQ ID NO: 1262 - RNA, 21 nt, Artificial Sequence
  siRNA antisense strand against APCS
auacagauaggaaauucaaag

SEQ ID NO: 1263 - RNA, 21 nt, Artificial Sequence
  siRNA antisense strand against APCS
cauacagauaggaaauucaaa

SEQ ID NO: 1264 - RNA, 21 nt, Artificial Sequence
  siRNA antisense strand against APCS
acauacagauaggaaauucaa

SEQ ID NO: 1265 - RNA, 21 nt, Artificial Sequence
  siRNA antisense strand against APCS
agacauacagauaggaaauuc

SEQ ID NO: 1266 - RNA, 21 nt, Artificial Sequence
  siRNA antisense strand against APCS
cagacauacagauaggaaauu

SEQ ID NO: 1267 - RNA, 21 nt, Artificial Sequence
  siRNA antisense strand against APCS
gcagacauacagauaggaaau

SEQ ID NO: 1268 - RNA, 21 nt, Artificial Sequence
  siRNA antisense strand against APCS
ggcagacauacagauaggaaa

SEQ ID NO: 1269 - RNA, 21 nt, Artificial Sequence
  siRNA antisense strand against APCS
aggcagacauacagauaggaa

SEQ ID NO: 1270 - RNA, 21 nt, Artificial Sequence
  siRNA antisense strand against APCS
uaggcagacauacagauagga

SEQ ID NO: 1271 - RNA, 21 nt, Artificial Sequence
  siRNA antisense strand against APCS
uuaggcagacauacagauagg

SEQ ID NO: 1272 - RNA, 21 nt, Artificial Sequence
  siRNA antisense strand against APCS
auuaggcagacauacagauag

SEQ ID NO: 1273 - RNA, 21 nt, Artificial Sequence
  siRNA antisense strand against APCS
aauuaggcagacauacagaua

SEQ ID NO: 1274 - RNA, 21 nt, Artificial Sequence
  siRNA antisense strand against APCS
uaauuaggcagacauacagau

SEQ ID NO: 1275 - RNA, 21 nt, Artificial Sequence
  siRNA antisense strand against APCS
uuaauuaggcagacauacaga

SEQ ID NO: 1276 - RNA, 21 nt, Artificial Sequence
  siRNA antisense strand against APCS
uuuaauuaggcagacauacag

SEQ ID NO: 1277 - RNA, 21 nt, Artificial Sequence
  siRNA antisense strand against APCS
uuuuaauuaggcagacauaca

SEQ ID NO: 1278 - RNA, 21 nt, Artificial Sequence
  siRNA antisense strand against APCS
uuuuuaauuaggcagacauac

SEQ ID NO: 1279 - RNA, 21 nt, Artificial Sequence
  siRNA antisense strand against APCS
uuuuuuaauuaggcagacaua

SEQ ID NO: 1280 - RNA, 21 nt, Artificial Sequence
  siRNA antisense strand against APCS
uuuuuuuaauuaggcagacau

SEQ ID NO: 1281 - RNA, 21 nt, Artificial Sequence
  siRNA antisense strand against APCS
auuuuuuuaauuaggcagaca

SEQ ID NO: 1282 - RNA, 21 nt, Artificial Sequence
  siRNA antisense strand against APCS
uauuuuuuuaauuaggcagac

SEQ ID NO: 1283 - RNA, 21 nt, Artificial Sequence
  siRNA antisense strand against APCS
auauuuuuuuaauuaggcaga

SEQ ID NO: 1284 - RNA, 21 nt, Artificial Sequence
  siRNA antisense strand against APCS
uauauuuuuuuaauuaggcag

SEQ ID NO: 1285 - RNA, 21 nt, Artificial Sequence
  siRNA antisense strand against APCS
auauauuuuuuuaauuaggca

SEQ ID NO: 1286 - RNA, 21 nt, Artificial Sequence
  siRNA antisense strand against APCS
uauauauuuuuuuaauuaggc

SEQ ID NO: 1287 - RNA, 21 nt, Artificial Sequence
  siRNA antisense strand against APCS
uacaauauauauuuuuuuaau

SEQ ID NO: 1288 - RNA, 19 nt, Homo sapiens
gcaugaauaucagacgcua

SEQ ID NO: 1289 - RNA, 19 nt, Homo sapiens
caugaauaucagacgcuag

SEQ ID NO: 1290 - RNA, 19 nt, Homo sapiens
auaucagacgcuaggggga

SEQ ID NO: 1291 - RNA, 19 nt, Homo sapiens
cuagggggacagccacugu

SEQ ID NO: 1292 - RNA, 19 nt, Homo sapiens
agggggacagccacugugu

SEQ ID NO: 1293 - RNA, 19 nt, Homo sapiens
ggggacagccacuguguug

SEQ ID NO: 1294 - RNA, 19 nt, Homo sapiens
gggacagccacuguguugu

SEQ ID NO: 1295 - RNA, 19 nt, Homo sapiens
ggacagccacuguguuguc

SEQ ID NO: 1296 - RNA, 19 nt, Homo sapiens
gacagccacuguguugucu

SEQ ID NO: 1297 - RNA, 19 nt, Homo sapiens
gccacuguguugucugcua

SEQ ID NO: 1298 - RNA, 19 nt, Homo sapiens
ccacuguguugucugcuac

SEQ ID NO: 1299 - RNA, 19 nt, Homo sapiens
cacuguguugucugcuacc

SEQ ID NO: 1300 - RNA, 19 nt, Homo sapiens
cuguguugucugcuacccu

SEQ ID NO: 1301 - RNA, 19 nt, Homo sapiens
uguguugucugcuacccuc

SEQ ID NO: 1302 - RNA, 19 nt, Homo sapiens
guguugucugcuacccuca

SEQ ID NO: 1303 - RNA, 19 nt, Homo sapiens
uguugucugcuacccucau

SEQ ID NO: 1304 - RNA, 19 nt, Homo sapiens
guugucugcuacccucauc

SEQ ID NO: 1305 - RNA, 19 nt, Homo sapiens
gucugcuacccucauccug

SEQ ID NO: 1306 - RNA, 19 nt, Homo sapiens
cugcuacccucauccuggu

SEQ ID NO: 1307 - RNA, 19 nt, Homo sapiens
gcuacccucauccugguca

SEQ ID NO: 1308 - RNA, 19 nt, Homo sapiens
cuacccucauccuggucac

SEQ ID NO: 1309 - RNA, 19 nt, Homo sapiens
uacccucauccuggucacu

SEQ ID NO: 1310 - RNA, 19 nt, Homo sapiens
acccucauccuggucacug

SEQ ID NO: 1311 - RNA, 19 nt, Homo sapiens
cccucauccuggucacugc

SEQ ID NO: 1312 - RNA, 19 nt, Homo sapiens
ccucauccuggucacugcu

SEQ ID NO: 1313 - RNA, 19 nt, Homo sapiens
cucauccuggucacugcuu

SEQ ID NO: 1314 - RNA, 19 nt, Homo sapiens
cauccuggucacugcuucu

SEQ ID NO: 1315 - RNA, 19 nt, Homo sapiens
auccuggucacugcuucug

SEQ ID NO: 1316 - RNA, 19 nt, Homo sapiens
uccuggucacugcuucugc

SEQ ID NO: 1317 - RNA, 19 nt, Homo sapiens
ccuggucacugcuucugcu

SEQ ID NO: 1318 - RNA, 19 nt, Homo sapiens
cuggucacugcuucugcua

SEQ ID NO: 1319 - RNA, 19 nt, Homo sapiens
uggucacugcuucugcuau

SEQ ID NO: 1320 - RNA, 19 nt, Homo sapiens
ggucacugcuucugcuaua

SEQ ID NO: 1321 - RNA, 19 nt, Homo sapiens
gucacugcuucugcuauaa

SEQ ID NO: 1322 - RNA, 19 nt, Homo sapiens
cacugcuucugcuauaaca

SEQ ID NO: 1323 - RNA, 19 nt, Homo sapiens
acugcuucugcuauaacag

SEQ ID NO: 1324 - RNA, 19 nt, Homo sapiens
cugcuucugcuauaacagc

SEQ ID NO: 1325 - RNA, 19 nt, Homo sapiens
gcuucugcuauaacagccc

SEQ ID NO: 1326 - RNA, 19 nt, Homo sapiens
cuucugcuauaacagcccu

SEQ ID NO: 1327 - RNA, 19 nt, Homo sapiens
uucugcuauaacagcccua

SEQ ID NO: 1328 - RNA, 19 nt, Homo sapiens
ucugcuauaacagcccuag

SEQ ID NO: 1329 - RNA, 19 nt, Homo sapiens
cugcuauaacagcccuagg

SEQ ID NO: 1330 - RNA, 19 nt, Homo sapiens
ugcuauaacagcccuaggc

SEQ ID NO: 1331 - RNA, 19 nt, Homo sapiens
gcuauaacagcccuaggcc

SEQ ID NO: 1332 - RNA, 19 nt, Homo sapiens
cuauaacagcccuaggcca

SEQ ID NO: 1333 - RNA, 19 nt, Homo sapiens
uauaacagcccuaggccag

SEQ ID NO: 1334 - RNA, 19 nt, Homo sapiens
auaacagcccuaggccagg

SEQ ID NO: 1335 - RNA, 19 nt, Homo sapiens
uaacagcccuaggccagga

SEQ ID NO: 1336 - RNA, 19 nt, Homo sapiens
acagcccuaggccaggaau

SEQ ID NO: 1337 - RNA, 19 nt, Homo sapiens
cagcccuaggccaggaaua

SEQ ID NO: 1338 - RNA, 19 nt, Homo sapiens
agcccuaggccaggaauau

SEQ ID NO: 1339 - RNA, 19 nt, Homo sapiens
gcccuaggccaggaauaug

SEQ ID NO: 1340 - RNA, 19 nt, Homo sapiens
cccuaggccaggaauauga

SEQ ID NO: 1341 - RNA, 19 nt, Homo sapiens
ccuaggccaggaauaugaa

SEQ ID NO: 1342 - RNA, 19 nt, Homo sapiens
cuaggccaggaauaugaac

SEQ ID NO: 1343 - RNA, 19 nt, Homo sapiens
uaggccaggaauaugaaca

SEQ ID NO: 1344 - RNA, 19 nt, Homo sapiens
aggccaggaauaugaacaa

SEQ ID NO: 1345 - RNA, 19 nt, Homo sapiens
ggccaggaauaugaacaag

SEQ ID NO: 1346 - RNA, 19 nt, Homo sapiens
gccaggaauaugaacaagc

SEQ ID NO: 1347 - RNA, 19 nt, Homo sapiens
ccaggaauaugaacaagcc

SEQ ID NO: 1348 - RNA, 19 nt, Homo sapiens
caggaauaugaacaagccg

SEQ ID NO: 1349 - RNA, 19 nt, Homo sapiens
aggaauaugaacaagccgc

SEQ ID NO: 1350 - RNA, 19 nt, Homo sapiens
ggaauaugaacaagccgcu

SEQ ID NO: 1351 - RNA, 19 nt, Homo sapiens
gaauaugaacaagccgcug

SEQ ID NO: 1352 - RNA, 19 nt, Homo sapiens
aauaugaacaagccgcugc

SEQ ID NO: 1353 - RNA, 19 nt, Homo sapiens
auaugaacaagccgcugcu

SEQ ID NO: 1354 - RNA, 19 nt, Homo sapiens
uaugaacaagccgcugcuu

SEQ ID NO: 1355 - RNA, 19 nt, Homo sapiens
augaacaagccgcugcuuu

SEQ ID NO: 1356 - RNA, 19 nt, Homo sapiens
ugaacaagccgcugcuuug

SEQ ID NO: 1357 - RNA, 19 nt, Homo sapiens
gaacaagccgcugcuuugg

SEQ ID NO: 1358 - RNA, 19 nt, Homo sapiens
aacaagccgcugcuuugga

SEQ ID NO: 1359 - RNA, 19 nt, Homo sapiens
acaagccgcugcuuuggau

SEQ ID NO: 1360 - RNA, 19 nt, Homo sapiens
caagccgcugcuuuggauc

SEQ ID NO: 1361 - RNA, 19 nt, Homo sapiens
aagccgcugcuuuggaucu

SEQ ID NO: 1362 - RNA, 19 nt, Homo sapiens
agccgcugcuuuggaucuc

SEQ ID NO: 1363 - RNA, 19 nt, Homo sapiens
gccgcugcuuuggaucucu

SEQ ID NO: 1364 - RNA, 19 nt, Homo sapiens
ccgcugcuuuggaucucug

SEQ ID NO: 1365 - RNA, 19 nt, Homo sapiens
cgcugcuuuggaucucugu

SEQ ID NO: 1366 - RNA, 19 nt, Homo sapiens
gcugcuuuggaucucuguc

SEQ ID NO: 1367 - RNA, 19 nt, Homo sapiens
cugcuuuggaucucugucc

SEQ ID NO: 1368 - RNA, 19 nt, Homo sapiens
ugcuuuggaucucuguccu

SEQ ID NO: 1369 - RNA, 19 nt, Homo sapiens
gcuuuggaucucuguccuc

SEQ ID NO: 1370 - RNA, 19 nt, Homo sapiens
cuuuggaucucuguccuca

SEQ ID NO: 1371 - RNA, 19 nt, Homo sapiens
uuuggaucucuguccucac

SEQ ID NO: 1372 - RNA, 19 nt, Homo sapiens
ggaucucuguccucaccag

SEQ ID NO: 1373 - RNA, 19 nt, Homo sapiens
gaucucuguccucaccagc

SEQ ID NO: 1374 - RNA, 19 nt, Homo sapiens
cucuguccucaccagccuc

SEQ ID NO: 1375 - RNA, 19 nt, Homo sapiens
cuguccucaccagccuccu

SEQ ID NO: 1376 - RNA, 19 nt, Homo sapiens
uguccucaccagccuccug

SEQ ID NO: 1377 - RNA, 19 nt, Homo sapiens
guccucaccagccuccugg

SEQ ID NO: 1378 - RNA, 19 nt, Homo sapiens
uccucaccagccuccugga

SEQ ID NO: 1379 - RNA, 19 nt, Homo sapiens
cucaccagccuccuggaag

SEQ ID NO: 1380 - RNA, 19 nt, Homo sapiens
ucaccagccuccuggaagc

SEQ ID NO: 1381 - RNA, 19 nt, Homo sapiens
accagccuccuggaagccu

SEQ ID NO: 1382 - RNA, 19 nt, Homo sapiens
ccagccuccuggaagccuu

SEQ ID NO: 1383 - RNA, 19 nt, Homo sapiens
cagccuccuggaagccuuu

SEQ ID NO: 1384 - RNA, 19 nt, Homo sapiens
agccuccuggaagccuuug

SEQ ID NO: 1385 - RNA, 19 nt, Homo sapiens
gccuccuggaagccuuugc

SEQ ID NO: 1386 - RNA, 19 nt, Homo sapiens
ccuccuggaagccuuugcu

SEQ ID NO: 1387 - RNA, 19 nt, Homo sapiens
cuccuggaagccuuugcuc

SEQ ID NO: 1388 - RNA, 19 nt, Homo sapiens
uccuggaagccuuugcuca

SEQ ID NO: 1389 - RNA, 19 nt, Homo sapiens
ccuggaagccuuugcucac

SEQ ID NO: 1390 - RNA, 19 nt, Homo sapiens
cuggaagccuuugcucaca

SEQ ID NO: 1391 - RNA, 19 nt, Homo sapiens
ggaagccuuugcucacaca

SEQ ID NO: 1392 - RNA, 19 nt, Homo sapiens
gaagccuuugcucacacag

SEQ ID NO: 1393 - RNA, 19 nt, Homo sapiens
aagccuuugcucacacaga

SEQ ID NO: 1394 - RNA, 19 nt, Homo sapiens
agccuuugcucacacagac

SEQ ID NO: 1395 - RNA, 19 nt, Homo sapiens
gccuuugcucacacagacc

SEQ ID NO: 1396 - RNA, 19 nt, Homo sapiens
ccuuugcucacacagaccu

SEQ ID NO: 1397 - RNA, 19 nt, Homo sapiens
cuuugcucacacagaccuc

SEQ ID NO: 1398 - RNA, 19 nt, Homo sapiens
uuugcucacacagaccuca

SEQ ID NO: 1399 - RNA, 19 nt, Homo sapiens
ugcucacacagaccucagu

SEQ ID NO: 1400 - RNA, 19 nt, Homo sapiens
cucacacagaccucagugg

SEQ ID NO: 1401 - RNA, 19 nt, Homo sapiens
cacacagaccucaguggga

SEQ ID NO: 1402 - RNA, 19 nt, Homo sapiens
acacagaccucagugggaa

SEQ ID NO: 1403 - RNA, 19 nt, Homo sapiens
cacagaccucagugggaag

SEQ ID NO: 1404 - RNA, 19 nt, Homo sapiens
agaccucagugggaaggug

SEQ ID NO: 1405 - RNA, 19 nt, Homo sapiens
gaccucagugggaaggugu

SEQ ID NO: 1406 - RNA, 19 nt, Homo sapiens
accucagugggaagguguu

SEQ ID NO: 1407 - RNA, 19 nt, Homo sapiens
ccucagugggaagguguuu

SEQ ID NO: 1408 - RNA, 19 nt, Homo sapiens
cucagugggaagguguuug

SEQ ID NO: 1409 - RNA, 19 nt, Homo sapiens
ucagugggaagguguuugu

SEQ ID NO: 1410 - RNA, 19 nt, Homo sapiens
cagugggaagguguuugua

SEQ ID NO: 1411 - RNA, 19 nt, Homo sapiens
agugggaagguguuuguau

SEQ ID NO: 1412 - RNA, 19 nt, Homo sapiens
gugggaagguguuuguauu

SEQ ID NO: 1413 - RNA, 19 nt, Homo sapiens
ugggaagguguuuguauuu

SEQ ID NO: 1414 - RNA, 19 nt, Homo sapiens
gggaagguguuuguauuuc

SEQ ID NO: 1415 - RNA, 19 nt, Homo sapiens
ggaagguguuuguauuucc

SEQ ID NO: 1416 - RNA, 19 nt, Homo sapiens
gaagguguuuguauuuccu

SEQ ID NO: 1417 - RNA, 19 nt, Homo sapiens
aagguguuuguauuuccua

SEQ ID NO: 1418 - RNA, 19 nt, Homo sapiens
agguguuuguauuuccuag

SEQ ID NO: 1419 - RNA, 19 nt, Homo sapiens
gguguuuguauuuccuaga

SEQ ID NO: 1420 - RNA, 19 nt, Homo sapiens
guguuuguauuuccuagag

SEQ ID NO: 1421 - RNA, 19 nt, Homo sapiens
uguuuguauuuccuagaga

SEQ ID NO: 1422 - RNA, 19 nt, Homo sapiens
guuuguauuuccuagagaa

SEQ ID NO: 1423 - RNA, 19 nt, Homo sapiens
uuuguauuuccuagagaau

SEQ ID NO: 1424 - RNA, 19 nt, Homo sapiens
uuguauuuccuagagaauc

SEQ ID NO: 1425 - RNA, 19 nt, Homo sapiens
uguauuuccuagagaaucu

SEQ ID NO: 1426 - RNA, 19 nt, Homo sapiens
guauuuccuagagaaucug

SEQ ID NO: 1427 - RNA, 19 nt, Homo sapiens
uauuuccuagagaaucugu

SEQ ID NO: 1428 - RNA, 19 nt, Homo sapiens
auuuccuagagaaucuguu

SEQ ID NO: 1429 - RNA, 19 nt, Homo sapiens
uuuccuagagaaucuguua

SEQ ID NO: 1430 - RNA, 19 nt, Homo sapiens
uccuagagaaucuguuacu

SEQ ID NO: 1431 - RNA, 19 nt, Homo sapiens
ccuagagaaucuguuacug

SEQ ID NO: 1432 - RNA, 19 nt, Homo sapiens
cuagagaaucuguuacuga

SEQ ID NO: 1433 - RNA, 19 nt, Homo sapiens
uagagaaucuguuacugau

SEQ ID NO: 1434 - RNA, 19 nt, Homo sapiens
agagaaucuguuacugauc

SEQ ID NO: 1435 - RNA, 19 nt, Homo sapiens
gagaaucuguuacugauca

SEQ ID NO: 1436 - RNA, 19 nt, Homo sapiens
agaaucuguuacugaucau

SEQ ID NO: 1437 - RNA, 19 nt, Homo sapiens
gaaucuguuacugaucaug

SEQ ID NO: 1438 - RNA, 19 nt, Homo sapiens
aaucuguuacugaucaugu

SEQ ID NO: 1439 - RNA, 19 nt, Homo sapiens
aucuguuacugaucaugua

SEQ ID NO: 1440 - RNA, 19 nt, Homo sapiens
ucuguuacugaucauguaa

SEQ ID NO: 1441 - RNA, 19 nt, Homo sapiens
cuguuacugaucauguaaa

SEQ ID NO: 1442 - RNA, 19 nt, Homo sapiens
uguuacugaucauguaaac

SEQ ID NO: 1443 - RNA, 19 nt, Homo sapiens
guuacugaucauguaaacu

SEQ ID NO: 1444 - RNA, 19 nt, Homo sapiens
acugaucauguaaacuuga

SEQ ID NO: 1445 - RNA, 19 nt, Homo sapiens
cugaucauguaaacuugau

SEQ ID NO: 1446 - RNA, 19 nt, Homo sapiens
ugaucauguaaacuugauc

SEQ ID NO: 1447 - RNA, 19 nt, Homo sapiens
gaucauguaaacuugauca

SEQ ID NO: 1448 - RNA, 19 nt, Homo sapiens
ucauguaaacuugaucaca

SEQ ID NO: 1449 - RNA, 19 nt, Homo sapiens
cauguaaacuugaucacac

SEQ ID NO: 1450 - RNA, 19 nt, Homo sapiens
uaaacuugaucacaccgcu

SEQ ID NO: 1451 - RNA, 19 nt, Homo sapiens
aaacuugaucacaccgcug

SEQ ID NO: 1452 - RNA, 19 nt, Homo sapiens
acuugaucacaccgcugga

SEQ ID NO: 1453 - RNA, 19 nt, Homo sapiens
uugaucacaccgcuggaga

SEQ ID NO: 1454 - RNA, 19 nt, Homo sapiens
ugaucacaccgcuggagaa

SEQ ID NO: 1455 - RNA, 19 nt, Homo sapiens
gaucacaccgcuggagaag

SEQ ID NO: 1456 - RNA, 19 nt, Homo sapiens
cacaccgcuggagaagccu

SEQ ID NO: 1457 - RNA, 19 nt, Homo sapiens
acaccgcuggagaagccuc

SEQ ID NO: 1458 - RNA, 19 nt, Homo sapiens
caccgcuggagaagccucu

SEQ ID NO: 1459 - RNA, 19 nt, Homo sapiens
accgcuggagaagccucua

SEQ ID NO: 1460 - RNA, 19 nt, Homo sapiens
ccgcuggagaagccucuac

SEQ ID NO: 1461 - RNA, 19 nt, Homo sapiens
cgcuggagaagccucuaca

SEQ ID NO: 1462 - RNA, 19 nt, Homo sapiens
gcuggagaagccucuacag

SEQ ID NO: 1463 - RNA, 19 nt, Homo sapiens
cuggagaagccucuacaga

SEQ ID NO: 1464 - RNA, 19 nt, Homo sapiens
uggagaagccucuacagaa

SEQ ID NO: 1465 - RNA, 19 nt, Homo sapiens
ggagaagccucuacagaac

SEQ ID NO: 1466 - RNA, 19 nt, Homo sapiens
gagaagccucuacagaacu

SEQ ID NO: 1467 - RNA, 19 nt, Homo sapiens
agaagccucuacagaacuu

SEQ ID NO: 1468 - RNA, 19 nt, Homo sapiens
gaagccucuacagaacuuu

SEQ ID NO: 1469 - RNA, 19 nt, Homo sapiens
aagccucuacagaacuuua

SEQ ID NO: 1470 - RNA, 19 nt, Homo sapiens
agccucuacagaacuuuac

SEQ ID NO: 1471 - RNA, 19 nt, Homo sapiens
gccucuacagaacuuuacc

SEQ ID NO: 1472 - RNA, 19 nt, Homo sapiens
ccucuacagaacuuuaccu

SEQ ID NO: 1473 - RNA, 19 nt, Homo sapiens
cucuacagaacuuuaccuu

SEQ ID NO: 1474 - RNA, 19 nt, Homo sapiens
ucuacagaacuuuaccuug

SEQ ID NO: 1475 - RNA, 19 nt, Homo sapiens
cuacagaacuuuaccuugu

SEQ ID NO: 1476 - RNA, 19 nt, Homo sapiens
uacagaacuuuaccuugug

SEQ ID NO: 1477 - RNA, 19 nt, Homo sapiens
acagaacuuuaccuugugu

SEQ ID NO: 1478 - RNA, 19 nt, Homo sapiens
cagaacuuuaccuuguguu

SEQ ID NO: 1479 - RNA, 19 nt, Homo sapiens
agaacuuuaccuuguguuu

SEQ ID NO: 1480 - RNA, 19 nt, Homo sapiens
gaacuuuaccuuguguuuu

SEQ ID NO: 1481 - RNA, 19 nt, Homo sapiens
aacuuuaccuuguguuuuc

SEQ ID NO: 1482 - RNA, 19 nt, Homo sapiens
cuuuaccuuguguuuucga

SEQ ID NO: 1483 - RNA, 19 nt, Homo sapiens
accuuguguuuucgagccu

SEQ ID NO: 1484 - RNA, 19 nt, Homo sapiens
ccuuguguuuucgagccua

SEQ ID NO: 1485 - RNA, 19 nt, Homo sapiens
cuuguguuuucgagccuau

SEQ ID NO: 1486 - RNA, 19 nt, Homo sapiens
uuguguuuucgagccuaua

SEQ ID NO: 1487 - RNA, 19 nt, Homo sapiens
guguuuucgagccuauagu

SEQ ID NO: 1488 - RNA, 19 nt, Homo sapiens
guuuucgagccuauaguga

SEQ ID NO: 1489 - RNA, 19 nt, Homo sapiens
uuuucgagccuauagugau

SEQ ID NO: 1490 - RNA, 19 nt, Homo sapiens
cgagccuauagugaucucu

SEQ ID NO: 1491 - RNA, 19 nt, Homo sapiens
gagccuauagugaucucuc

SEQ ID NO: 1492 - RNA, 19 nt, Homo sapiens
agccuauagugaucucucu

SEQ ID NO: 1493 - RNA, 19 nt, Homo sapiens
gccuauagugaucucucuc

SEQ ID NO: 1494 - RNA, 19 nt, Homo sapiens
ccuauagugaucucucucg

SEQ ID NO: 1495 - RNA, 19 nt, Homo sapiens
cuauagugaucucucucgu

SEQ ID NO: 1496 - RNA, 19 nt, Homo sapiens
uauagugaucucucucgug

SEQ ID NO: 1497 - RNA, 19 nt, Homo sapiens
agugaucucucucgugccu

SEQ ID NO: 1498 - RNA, 19 nt, Homo sapiens
gugaucucucucgugccua

SEQ ID NO: 1499 - RNA, 19 nt, Homo sapiens
ugaucucucucgugccuac

SEQ ID NO: 1500 - RNA, 19 nt, Homo sapiens
gaucucucucgugccuaca

SEQ ID NO: 1501 - RNA, 19 nt, Homo sapiens
cucucgugccuacagccuc

SEQ ID NO: 1502 - RNA, 19 nt, Homo sapiens
ucucgugccuacagccucu

SEQ ID NO: 1503 - RNA, 19 nt, Homo sapiens
cucgugccuacagccucuu

SEQ ID NO: 1504 - RNA, 19 nt, Homo sapiens
cgugccuacagccucuucu

SEQ ID NO: 1505 - RNA, 19 nt, Homo sapiens
gugccuacagccucuucuc

SEQ ID NO: 1506 - RNA, 19 nt, Homo sapiens
gccuacagccucuucuccu

SEQ ID NO: 1507 - RNA, 19 nt, Homo sapiens
ccuacagccucuucuccua

SEQ ID NO: 1508 - RNA, 19 nt, Homo sapiens
cuacagccucuucuccuac

SEQ ID NO: 1509 - RNA, 19 nt, Homo sapiens
uacagccucuucuccuaca

SEQ ID NO: 1510 - RNA, 19 nt, Homo sapiens
acagccucuucuccuacaa

SEQ ID NO: 1511 - RNA, 19 nt, Homo sapiens
cagccucuucuccuacaau

SEQ ID NO: 1512 - RNA, 19 nt, Homo sapiens
agccucuucuccuacaaua

SEQ ID NO: 1513 - RNA, 19 nt, Homo sapiens
gccucuucuccuacaauac

SEQ ID NO: 1514 - RNA, 19 nt, Homo sapiens
ccucuucuccuacaauacc

SEQ ID NO: 1515 - RNA, 19 nt, Homo sapiens
ucuucuccuacaauaccca

SEQ ID NO: 1516 - RNA, 19 nt, Homo sapiens
ucuccuacaauacccaagg

SEQ ID NO: 1517 - RNA, 19 nt, Homo sapiens
cuccuacaauacccaaggc

SEQ ID NO: 1518 - RNA, 19 nt, Homo sapiens
uccuacaauacccaaggca

SEQ ID NO: 1519 - RNA, 19 nt, Homo sapiens
ccuacaauacccaaggcag

SEQ ID NO: 1520 - RNA, 19 nt, Homo sapiens
cuacaauacccaaggcagg

SEQ ID NO: 1521 - RNA, 19 nt, Homo sapiens
caauacccaaggcagggau

SEQ ID NO: 1522 - RNA, 19 nt, Homo sapiens
auacccaaggcagggauaa

SEQ ID NO: 1523 - RNA, 19 nt, Homo sapiens
uacccaaggcagggauaau

SEQ ID NO: 1524 - RNA, 19 nt, Homo sapiens
ccaaggcagggauaaugag

SEQ ID NO: 1525 - RNA, 19 nt, Homo sapiens
aaggcagggauaaugagcu

SEQ ID NO: 1526 - RNA, 19 nt, Homo sapiens
aggcagggauaaugagcua

SEQ ID NO: 1527 - RNA, 19 nt, Homo sapiens
gcagggauaaugagcuacu

SEQ ID NO: 1528 - RNA, 19 nt, Homo sapiens
cagggauaaugagcuacua

SEQ ID NO: 1529 - RNA, 19 nt, Homo sapiens
agggauaaugagcuacuag

SEQ ID NO: 1530 - RNA, 19 nt, Homo sapiens
gggauaaugagcuacuagu

SEQ ID NO: 1531 - RNA, 19 nt, Homo sapiens
ggauaaugagcuacuaguu

SEQ ID NO: 1532 - RNA, 19 nt, Homo sapiens
gauaaugagcuacuaguuu

SEQ ID NO: 1533 - RNA, 19 nt, Homo sapiens
auaaugagcuacuaguuua

SEQ ID NO: 1534 - RNA, 19 nt, Homo sapiens
uaaugagcuacuaguuuau

SEQ ID NO: 1535 - RNA, 19 nt, Homo sapiens
augagcuacuaguuuauaa

SEQ ID NO: 1536 - RNA, 19 nt, Homo sapiens
ugagcuacuaguuuauaaa

SEQ ID NO: 1537 - RNA, 19 nt, Homo sapiens
gagcuacuaguuuauaaag

SEQ ID NO: 1538 - RNA, 19 nt, Homo sapiens
agcuacuaguuuauaaaga

SEQ ID NO: 1539 - RNA, 19 nt, Homo sapiens
gcuacuaguuuauaaagaa

SEQ ID NO: 1540 - RNA, 19 nt, Homo sapiens
cuacuaguuuauaaagaaa

SEQ ID NO: 1541 - RNA, 19 nt, Homo sapiens
aguuuauaaagaaagaguu

SEQ ID NO: 1542 - RNA, 19 nt, Homo sapiens
aagaaagaguuggagagua

SEQ ID NO: 1543 - RNA, 19 nt, Homo sapiens
agaaagaguuggagaguau

SEQ ID NO: 1544 - RNA, 19 nt, Homo sapiens
gaaagaguuggagaguaua

SEQ ID NO: 1545 - RNA, 19 nt, Homo sapiens
aagaguuggagaguauagu

SEQ ID NO: 1546 - RNA, 19 nt, Homo sapiens
agaguuggagaguauaguc

SEQ ID NO: 1547 - RNA, 19 nt, Homo sapiens
gaguuggagaguauagucu

SEQ ID NO: 1548 - RNA, 19 nt, Homo sapiens
aguuggagaguauagucua

SEQ ID NO: 1549 - RNA, 19 nt, Homo sapiens
guuggagaguauagucuau

SEQ ID NO: 1550 - RNA, 19 nt, Homo sapiens
uuggagaguauagucuaua

SEQ ID NO: 1551 - RNA, 19 nt, Homo sapiens
uggagaguauagucuauac

SEQ ID NO: 1552 - RNA, 19 nt, Homo sapiens
ggagaguauagucuauaca

SEQ ID NO: 1553 - RNA, 19 nt, Homo sapiens
gagaguauagucuauacau

SEQ ID NO: 1554 - RNA, 19 nt, Homo sapiens
agaguauagucuauacauu

SEQ ID NO: 1555 - RNA, 19 nt, Homo sapiens
gaguauagucuauacauug

SEQ ID NO: 1556 - RNA, 19 nt, Homo sapiens
aguauagucuauacauugg

SEQ ID NO: 1557 - RNA, 19 nt, Homo sapiens
guauagucuauacauugga

SEQ ID NO: 1558 - RNA, 19 nt, Homo sapiens
gucuauacauuggaagaca

SEQ ID NO: 1559 - RNA, 19 nt, Homo sapiens
cuauacauuggaagacaca

SEQ ID NO: 1560 - RNA, 19 nt, Homo sapiens
uauacauuggaagacacaa

SEQ ID NO: 1561 - RNA, 19 nt, Homo sapiens
auacauuggaagacacaaa

SEQ ID NO: 1562 - RNA, 19 nt, Homo sapiens
acauuggaagacacaaagu

SEQ ID NO: 1563 - RNA, 19 nt, Homo sapiens
cauuggaagacacaaaguu

SEQ ID NO: 1564 - RNA, 19 nt, Homo sapiens
auuggaagacacaaaguua

SEQ ID NO: 1565 - RNA, 19 nt, Homo sapiens
uggaagacacaaaguuaca

SEQ ID NO: 1566 - RNA, 19 nt, Homo sapiens
ggaagacacaaaguuacau

SEQ ID NO: 1567 - RNA, 19 nt, Homo sapiens
gaagacacaaaguuacauc

SEQ ID NO: 1568 - RNA, 19 nt, Homo sapiens
aagacacaaaguuacaucc

SEQ ID NO: 1569 - RNA, 19 nt, Homo sapiens
agacacaaaguuacaucca

SEQ ID NO: 1570 - RNA, 19 nt, Homo sapiens
gacacaaaguuacauccaa

SEQ ID NO: 1571 - RNA, 19 nt, Homo sapiens
acacaaaguuacauccaaa

SEQ ID NO: 1572 - RNA, 19 nt, Homo sapiens
cacaaaguuacauccaaag

SEQ ID NO: 1573 - RNA, 19 nt, Homo sapiens
caaaguuacauccaaaguu

SEQ ID NO: 1574 - RNA, 19 nt, Homo sapiens
aaaguuacauccaaaguua

SEQ ID NO: 1575 - RNA, 19 nt, Homo sapiens
aaguuacauccaaaguuau

SEQ ID NO: 1576 - RNA, 19 nt, Homo sapiens
aguuacauccaaaguuauc

SEQ ID NO: 1577 - RNA, 19 nt, Homo sapiens
guuacauccaaaguuaucg

SEQ ID NO: 1578 - RNA, 19 nt, Homo sapiens
uuacauccaaaguuaucga

SEQ ID NO: 1579 - RNA, 19 nt, Homo sapiens
uacauccaaaguuaucgaa

SEQ ID NO: 1580 - RNA, 19 nt, Homo sapiens
acauccaaaguuaucgaaa

SEQ ID NO: 1581 - RNA, 19 nt, Homo sapiens
cauccaaaguuaucgaaaa

SEQ ID NO: 1582 - RNA, 19 nt, Homo sapiens
auccaaaguuaucgaaaag

SEQ ID NO: 1583 - RNA, 19 nt, Homo sapiens
uccaaaguuaucgaaaagu

SEQ ID NO: 1584 - RNA, 19 nt, Homo sapiens
ccaaaguuaucgaaaaguu

SEQ ID NO: 1585 - RNA, 19 nt, Homo sapiens
caaaguuaucgaaaaguuc

SEQ ID NO: 1586 - RNA, 19 nt, Homo sapiens
cgaaaaguucccggcucca

SEQ ID NO: 1587 - RNA, 19 nt, Homo sapiens
aaaaguucccggcuccagu

SEQ ID NO: 1588 - RNA, 19 nt, Homo sapiens
cccggcuccagugcacauc

SEQ ID NO: 1589 - RNA, 19 nt, Homo sapiens
cggcuccagugcacaucug

SEQ ID NO: 1590 - RNA, 19 nt, Homo sapiens
ggcuccagugcacaucugu

SEQ ID NO: 1591 - RNA, 19 nt, Homo sapiens
gcuccagugcacaucugug

SEQ ID NO: 1592 - RNA, 19 nt, Homo sapiens
cuccagugcacaucugugu

SEQ ID NO: 1593 - RNA, 19 nt, Homo sapiens
ccagugcacaucuguguga

SEQ ID NO: 1594 - RNA, 19 nt, Homo sapiens
gugcacaucugugugagcu

SEQ ID NO: 1595 - RNA, 19 nt, Homo sapiens
gcacaucugugugagcugg

SEQ ID NO: 1596 - RNA, 19 nt, Homo sapiens
acaucugugugagcuggga

SEQ ID NO: 1597 - RNA, 19 nt, Homo sapiens
aucugugugagcugggagu

SEQ ID NO: 1598 - RNA, 19 nt, Homo sapiens
ugugugagcugggaguccu

SEQ ID NO: 1599 - RNA, 19 nt, Homo sapiens
gugugagcugggaguccuc

SEQ ID NO: 1600 - RNA, 19 nt, Homo sapiens
agcugggaguccucaucag

SEQ ID NO: 1601 - RNA, 19 nt, Homo sapiens
gcugggaguccucaucagg

SEQ ID NO: 1602 - RNA, 19 nt, Homo sapiens
cugggaguccucaucaggu

SEQ ID NO: 1603 - RNA, 19 nt, Homo sapiens
ugggaguccucaucaggua

SEQ ID NO: 1604 - RNA, 19 nt, Homo sapiens
gggaguccucaucagguau

SEQ ID NO: 1605 - RNA, 19 nt, Homo sapiens
ggaguccucaucagguauu

SEQ ID NO: 1606 - RNA, 19 nt, Homo sapiens
gaguccucaucagguauug

SEQ ID NO: 1607 - RNA, 19 nt, Homo sapiens
guccucaucagguauugcu

SEQ ID NO: 1608 - RNA, 19 nt, Homo sapiens
uccucaucagguauugcug

SEQ ID NO: 1609 - RNA, 19 nt, Homo sapiens
ccucaucagguauugcuga

SEQ ID NO: 1610 - RNA, 19 nt, Homo sapiens
cucaucagguauugcugaa

SEQ ID NO: 1611 - RNA, 19 nt, Homo sapiens
ucaucagguauugcugaau

SEQ ID NO: 1612 - RNA, 19 nt, Homo sapiens
caucagguauugcugaauu

SEQ ID NO: 1613 - RNA, 19 nt, Homo sapiens
aucagguauugcugaauuu

SEQ ID NO: 1614 - RNA, 19 nt, Homo sapiens
ucagguauugcugaauuuu

SEQ ID NO: 1615 - RNA, 19 nt, Homo sapiens
cagguauugcugaauuuug

SEQ ID NO: 1616 - RNA, 19 nt, Homo sapiens
agguauugcugaauuuugg

SEQ ID NO: 1617 - RNA, 19 nt, Homo sapiens
gguauugcugaauuuugga

SEQ ID NO: 1618 - RNA, 19 nt, Homo sapiens
guauugcugaauuuuggau

SEQ ID NO: 1619 - RNA, 19 nt, Homo sapiens
auugcugaauuuuggauca

SEQ ID NO: 1620 - RNA, 19 nt, Homo sapiens
ugcugaauuuuggaucaau

SEQ ID NO: 1621 - RNA, 19 nt, Homo sapiens
gcugaauuuuggaucaaug

SEQ ID NO: 1622 - RNA, 19 nt, Homo sapiens
cugaauuuuggaucaaugg

SEQ ID NO: 1623 - RNA, 19 nt, Homo sapiens
gaauuuuggaucaauggga

SEQ ID NO: 1624 - RNA, 19 nt, Homo sapiens
ggaucaaugggacaccuuu

SEQ ID NO: 1625 - RNA, 19 nt, Homo sapiens
caaugggacaccuuuggug

SEQ ID NO: 1626 - RNA, 19 nt, Homo sapiens
aaugggacaccuuugguga

SEQ ID NO: 1627 - RNA, 19 nt, Homo sapiens
augggacaccuuuggugaa

SEQ ID NO: 1628 - RNA, 19 nt, Homo sapiens
ugggacaccuuuggugaaa

SEQ ID NO: 1629 - RNA, 19 nt, Homo sapiens
gggacaccuuuggugaaaa

SEQ ID NO: 1630 - RNA, 19 nt, Homo sapiens
ggacaccuuuggugaaaaa

SEQ ID NO: 1631 - RNA, 19 nt, Homo sapiens
accuuuggugaaaaagggu

SEQ ID NO: 1632 - RNA, 19 nt, Homo sapiens
ccuuuggugaaaaaggguc

SEQ ID NO: 1633 - RNA, 19 nt, Homo sapiens
cuuuggugaaaaagggucu

SEQ ID NO: 1634 - RNA, 19 nt, Homo sapiens
ggugaaaaagggucugcga

SEQ ID NO: 1635 - RNA, 19 nt, Homo sapiens
gugaaaaagggucugcgac

SEQ ID NO: 1636 - RNA, 19 nt, Homo sapiens
ugaaaaagggucugcgaca

SEQ ID NO: 1637 - RNA, 19 nt, Homo sapiens
gaaaaagggucugcgacag

SEQ ID NO: 1638 - RNA, 19 nt, Homo sapiens
aaagggucugcgacagggu

SEQ ID NO: 1639 - RNA, 19 nt, Homo sapiens
aagggucugcgacaggguu

SEQ ID NO: 1640 - RNA, 19 nt, Homo sapiens
agggucugcgacaggguua

SEQ ID NO: 1641 - RNA, 19 nt, Homo sapiens
gggucugcgacaggguuac

SEQ ID NO: 1642 - RNA, 19 nt, Homo sapiens
ggucugcgacaggguuacu

SEQ ID NO: 1643 - RNA, 19 nt, Homo sapiens
gucugcgacaggguuacuu

SEQ ID NO: 1644 - RNA, 19 nt, Homo sapiens
ucugcgacaggguuacuuu

SEQ ID NO: 1645 - RNA, 19 nt, Homo sapiens
cugcgacaggguuacuuug

SEQ ID NO: 1646 - RNA, 19 nt, Homo sapiens
ugcgacaggguuacuuugu

SEQ ID NO: 1647 - RNA, 19 nt, Homo sapiens
gcgacaggguuacuuugua

SEQ ID NO: 1648 - RNA, 19 nt, Homo sapiens
cgacaggguuacuuuguag

SEQ ID NO: 1649 - RNA, 19 nt, Homo sapiens
gacaggguuacuuuguaga

SEQ ID NO: 1650 - RNA, 19 nt, Homo sapiens
acaggguuacuuuguagaa

SEQ ID NO: 1651 - RNA, 19 nt, Homo sapiens
caggguuacuuuguagaag

SEQ ID NO: 1652 - RNA, 19 nt, Homo sapiens
aggguuacuuuguagaagc

SEQ ID NO: 1653 - RNA, 19 nt, Homo sapiens
ggguuacuuuguagaagcu

SEQ ID NO: 1654 - RNA, 19 nt, Homo sapiens
gguuacuuuguagaagcuc

SEQ ID NO: 1655 - RNA, 19 nt, Homo sapiens
guuacuuuguagaagcuca

SEQ ID NO: 1656 - RNA, 19 nt, Homo sapiens
agaagcucagcccaagauu

SEQ ID NO: 1657 - RNA, 19 nt, Homo sapiens
gaagcucagcccaagauug

SEQ ID NO: 1658 - RNA, 19 nt, Homo sapiens
aagcucagcccaagauugu

SEQ ID NO: 1659 - RNA, 19 nt, Homo sapiens
agcucagcccaagauuguc

SEQ ID NO: 1660 - RNA, 19 nt, Homo sapiens
cucagcccaagauuguccu

SEQ ID NO: 1661 - RNA, 19 nt, Homo sapiens
agcccaagauuguccuggg

SEQ ID NO: 1662 - RNA, 19 nt, Homo sapiens
ccaagauuguccuggggca

SEQ ID NO: 1663 - RNA, 19 nt, Homo sapiens
caagauuguccuggggcag

SEQ ID NO: 1664 - RNA, 19 nt, Homo sapiens
agauuguccuggggcagga

SEQ ID NO: 1665 - RNA, 19 nt, Homo sapiens
gauuguccuggggcaggaa

SEQ ID NO: 1666 - RNA, 19 nt, Homo sapiens
uuguccuggggcaggaaca

SEQ ID NO: 1667 - RNA, 19 nt, Homo sapiens
uccuggggcaggaacagga

SEQ ID NO: 1668 - RNA, 19 nt, Homo sapiens
cuggggcaggaacaggauu

SEQ ID NO: 1669 - RNA, 19 nt, Homo sapiens
uggggcaggaacaggauuc

SEQ ID NO: 1670 - RNA, 19 nt, Homo sapiens
ggggcaggaacaggauucc

SEQ ID NO: 1671 - RNA, 19 nt, Homo sapiens
ggcaggaacaggauuccua

SEQ ID NO: 1672 - RNA, 19 nt, Homo sapiens
gcaggaacaggauuccuau

SEQ ID NO: 1673 - RNA, 19 nt, Homo sapiens
caggaacaggauuccuaug

SEQ ID NO: 1674 - RNA, 19 nt, Homo sapiens
ggaacaggauuccuauggg

SEQ ID NO: 1675 - RNA, 19 nt, Homo sapiens
gaacaggauuccuaugggg

SEQ ID NO: 1676 - RNA, 19 nt, Homo sapiens
acaggauuccuaugggggc

SEQ ID NO: 1677 - RNA, 19 nt, Homo sapiens
caggauuccuaugggggca

SEQ ID NO: 1678 - RNA, 19 nt, Homo sapiens
ggauuccuaugggggcaag

SEQ ID NO: 1679 - RNA, 19 nt, Homo sapiens
gauuccuaugggggcaagu

SEQ ID NO: 1680 - RNA, 19 nt, Homo sapiens
auuccuaugggggcaaguu

SEQ ID NO: 1681 - RNA, 19 nt, Homo sapiens
uuccuaugggggcaaguuu

SEQ ID NO: 1682 - RNA, 19 nt, Homo sapiens
uccuaugggggcaaguuug

SEQ ID NO: 1683 - RNA, 19 nt, Homo sapiens
ccuaugggggcaaguuuga

SEQ ID NO: 1684 - RNA, 19 nt, Homo sapiens
cuaugggggcaaguuugau

SEQ ID NO: 1685 - RNA, 19 nt, Homo sapiens
uaugggggcaaguuugaua

SEQ ID NO: 1686 - RNA, 19 nt, Homo sapiens
gggggcaaguuugauagga

SEQ ID NO: 1687 - RNA, 19 nt, Homo sapiens
ggggcaaguuugauaggag

SEQ ID NO: 1688 - RNA, 19 nt, Homo sapiens
gggcaaguuugauaggagc

SEQ ID NO: 1689 - RNA, 19 nt, Homo sapiens
ggcaaguuugauaggagcc

SEQ ID NO: 1690 - RNA, 19 nt, Homo sapiens
gcaaguuugauaggagcca

SEQ ID NO: 1691 - RNA, 19 nt, Homo sapiens
caaguuugauaggagccag

SEQ ID NO: 1692 - RNA, 19 nt, Homo sapiens
aaguuugauaggagccagu

SEQ ID NO: 1693 - RNA, 19 nt, Homo sapiens
uugauaggagccaguccuu

SEQ ID NO: 1694 - RNA, 19 nt, Homo sapiens
ugauaggagccaguccuuu

SEQ ID NO: 1695 - RNA, 19 nt, Homo sapiens
gauaggagccaguccuuug

SEQ ID NO: 1696 - RNA, 19 nt, Homo sapiens
auaggagccaguccuuugu

SEQ ID NO: 1697 - RNA, 19 nt, Homo sapiens
aggagccaguccuuugugg

SEQ ID NO: 1698 - RNA, 19 nt, Homo sapiens
ggagccaguccuuuguggg

SEQ ID NO: 1699 - RNA, 19 nt, Homo sapiens
gagccaguccuuuguggga

SEQ ID NO: 1700 - RNA, 19 nt, Homo sapiens
agccaguccuuugugggag

SEQ ID NO: 1701 - RNA, 19 nt, Homo sapiens
gccaguccuuugugggaga

SEQ ID NO: 1702 - RNA, 19 nt, Homo sapiens
ccaguccuuugugggagag

SEQ ID NO: 1703 - RNA, 19 nt, Homo sapiens
caguccuuugugggagaga

SEQ ID NO: 1704 - RNA, 19 nt, Homo sapiens
aguccuuugugggagagau

SEQ ID NO: 1705 - RNA, 19 nt, Homo sapiens
guccuuugugggagagauu

SEQ ID NO: 1706 - RNA, 19 nt, Homo sapiens
uccuuugugggagagauug

SEQ ID NO: 1707 - RNA, 19 nt, Homo sapiens
ccuuugugggagagauugg

SEQ ID NO: 1708 - RNA, 19 nt, Homo sapiens
cuuugugggagagauuggg

SEQ ID NO: 1709 - RNA, 19 nt, Homo sapiens
uugugggagagauugggga

SEQ ID NO: 1710 - RNA, 19 nt, Homo sapiens
ugugggagagauuggggau

SEQ ID NO: 1711 - RNA, 19 nt, Homo sapiens
gugggagagauuggggauu

SEQ ID NO: 1712 - RNA, 19 nt, Homo sapiens
ugggagagauuggggauuu

SEQ ID NO: 1713 - RNA, 19 nt, Homo sapiens
gggagagauuggggauuug

SEQ ID NO: 1714 - RNA, 19 nt, Homo sapiens
ggagagauuggggauuugu

SEQ ID NO: 1715 - RNA, 19 nt, Homo sapiens
gagagauuggggauuugua

SEQ ID NO: 1716 - RNA, 19 nt, Homo sapiens
agagauuggggauuuguac

SEQ ID NO: 1717 - RNA, 19 nt, Homo sapiens
gagauuggggauuuguaca

SEQ ID NO: 1718 - RNA, 19 nt, Homo sapiens
agauuggggauuuguacau

SEQ ID NO: 1719 - RNA, 19 nt, Homo sapiens
ggggauuuguacauguggg

SEQ ID NO: 1720 - RNA, 19 nt, Homo sapiens
gggauuuguacauguggga

SEQ ID NO: 1721 - RNA, 19 nt, Homo sapiens
ggauuuguacaugugggac

SEQ ID NO: 1722 - RNA, 19 nt, Homo sapiens
gauuuguacaugugggacu

SEQ ID NO: 1723 - RNA, 19 nt, Homo sapiens
uguacaugugggacucugu

SEQ ID NO: 1724 - RNA, 19 nt, Homo sapiens
guacaugugggacucugug

SEQ ID NO: 1725 - RNA, 19 nt, Homo sapiens
acaugugggacucugugcu

SEQ ID NO: 1726 - RNA, 19 nt, Homo sapiens
gggacucugugcugccccc

SEQ ID NO: 1727 - RNA, 19 nt, Homo sapiens
ggacucugugcugccccca

SEQ ID NO: 1728 - RNA, 19 nt, Homo sapiens
acucugugcugcccccaga

SEQ ID NO: 1729 - RNA, 19 nt, Homo sapiens
cucugugcugcccccagaa

SEQ ID NO: 1730 - RNA, 19 nt, Homo sapiens
cugugcugcccccagaaaa

SEQ ID NO: 1731 - RNA, 19 nt, Homo sapiens
ugugcugcccccagaaaau

SEQ ID NO: 1732 - RNA, 19 nt, Homo sapiens
gugcugcccccagaaaaua

SEQ ID NO: 1733 - RNA, 19 nt, Homo sapiens
gcugcccccagaaaauauc

SEQ ID NO: 1734 - RNA, 19 nt, Homo sapiens
cccccagaaaauauccugu

SEQ ID NO: 1735 - RNA, 19 nt, Homo sapiens
cccagaaaauauccugucu

SEQ ID NO: 1736 - RNA, 19 nt, Homo sapiens
ccagaaaauauccugucug

SEQ ID NO: 1737 - RNA, 19 nt, Homo sapiens
cagaaaauauccugucugc

SEQ ID NO: 1738 - RNA, 19 nt, Homo sapiens
gaaaauauccugucugccu

SEQ ID NO: 1739 - RNA, 19 nt, Homo sapiens
aaaauauccugucugccua

SEQ ID NO: 1740 - RNA, 19 nt, Homo sapiens
aaauauccugucugccuau

SEQ ID NO: 1741 - RNA, 19 nt, Homo sapiens
ccugucugccuaucagggu

SEQ ID NO: 1742 - RNA, 19 nt, Homo sapiens
cugucugccuaucagggua

SEQ ID NO: 1743 - RNA, 19 nt, Homo sapiens
gucugccuaucaggguacc

SEQ ID NO: 1744 - RNA, 19 nt, Homo sapiens
ugccuaucaggguaccccu

SEQ ID NO: 1745 - RNA, 19 nt, Homo sapiens
gccuaucaggguaccccuc

SEQ ID NO: 1746 - RNA, 19 nt, Homo sapiens
ccuaucaggguaccccucu

SEQ ID NO: 1747 - RNA, 19 nt, Homo sapiens
cuaucaggguaccccucuc

SEQ ID NO: 1748 - RNA, 19 nt, Homo sapiens
caggguaccccucucccug

SEQ ID NO: 1749 - RNA, 19 nt, Homo sapiens
ggguaccccucucccugcc

SEQ ID NO: 1750 - RNA, 19 nt, Homo sapiens
gguaccccucucccugcca

SEQ ID NO: 1751 - RNA, 19 nt, Homo sapiens
guaccccucucccugccaa

SEQ ID NO: 1752 - RNA, 19 nt, Homo sapiens
uaccccucucccugccaau

SEQ ID NO: 1753 - RNA, 19 nt, Homo sapiens
ccccucucccugccaauau

SEQ ID NO: 1754 - RNA, 19 nt, Homo sapiens
cccucucccugccaauauc

SEQ ID NO: 1755 - RNA, 19 nt, Homo sapiens
cugccaauauccuggacug

SEQ ID NO: 1756 - RNA, 19 nt, Homo sapiens
ccaauauccuggacuggca

SEQ ID NO: 1757 - RNA, 19 nt, Homo sapiens
caauauccuggacuggcag

SEQ ID NO: 1758 - RNA, 19 nt, Homo sapiens
uccuggacuggcaggcucu

SEQ ID NO: 1759 - RNA, 19 nt, Homo sapiens
ccuggacuggcaggcucug

SEQ ID NO: 1760 - RNA, 19 nt, Homo sapiens
cuggacuggcaggcucuga

SEQ ID NO: 1761 - RNA, 19 nt, Homo sapiens
uggacuggcaggcucugaa

SEQ ID NO: 1762 - RNA, 19 nt, Homo sapiens
ggacuggcaggcucugaac

SEQ ID NO: 1763 - RNA, 19 nt, Homo sapiens
gacuggcaggcucugaacu

SEQ ID NO: 1764 - RNA, 19 nt, Homo sapiens
acuggcaggcucugaacua

SEQ ID NO: 1765 - RNA, 19 nt, Homo sapiens
cuggcaggcucugaacuau

SEQ ID NO: 1766 - RNA, 19 nt, Homo sapiens
uggcaggcucugaacuaug

SEQ ID NO: 1767 - RNA, 19 nt, Homo sapiens
ggcaggcucugaacuauga

SEQ ID NO: 1768 - RNA, 19 nt, Homo sapiens
gcaggcucugaacuaugaa

SEQ ID NO: 1769 - RNA, 19 nt, Homo sapiens
caggcucugaacuaugaaa

SEQ ID NO: 1770 - RNA, 19 nt, Homo sapiens
aggcucugaacuaugaaau

SEQ ID NO: 1771 - RNA, 19 nt, Homo sapiens
ggcucugaacuaugaaauc

SEQ ID NO: 1772 - RNA, 19 nt, Homo sapiens
gcucugaacuaugaaauca

SEQ ID NO: 1773 - RNA, 19 nt, Homo sapiens
cucugaacuaugaaaucag

SEQ ID NO: 1774 - RNA, 19 nt, Homo sapiens
ucugaacuaugaaaucaga

SEQ ID NO: 1775 - RNA, 19 nt, Homo sapiens
gaacuaugaaaucagagga

SEQ ID NO: 1776 - RNA, 19 nt, Homo sapiens
aacuaugaaaucagaggau

SEQ ID NO: 1777 - RNA, 19 nt, Homo sapiens
acuaugaaaucagaggaua

SEQ ID NO: 1778 - RNA, 19 nt, Homo sapiens
cuaugaaaucagaggauau

SEQ ID NO: 1779 - RNA, 19 nt, Homo sapiens
uaugaaaucagaggauaug

SEQ ID NO: 1780 - RNA, 19 nt, Homo sapiens
ugaaaucagaggauauguc

SEQ ID NO: 1781 - RNA, 19 nt, Homo sapiens
gaaaucagaggauauguca

SEQ ID NO: 1782 - RNA, 19 nt, Homo sapiens
aaaucagaggauaugucau

SEQ ID NO: 1783 - RNA, 19 nt, Homo sapiens
aaucagaggauaugucauc

SEQ ID NO: 1784 - RNA, 19 nt, Homo sapiens
cagaggauaugucaucauc

SEQ ID NO: 1785 - RNA, 19 nt, Homo sapiens
agaggauaugucaucauca

SEQ ID NO: 1786 - RNA, 19 nt, Homo sapiens
gaggauaugucaucaucaa

SEQ ID NO: 1787 - RNA, 19 nt, Homo sapiens
aggauaugucaucaucaaa

SEQ ID NO: 1788 - RNA, 19 nt, Homo sapiens
ggauaugucaucaucaaac

SEQ ID NO: 1789 - RNA, 19 nt, Homo sapiens
gauaugucaucaucaaacc

SEQ ID NO: 1790 - RNA, 19 nt, Homo sapiens
augucaucaucaaacccuu

SEQ ID NO: 1791 - RNA, 19 nt, Homo sapiens
caucaucaaacccuuggug

SEQ ID NO: 1792 - RNA, 19 nt, Homo sapiens
ucaucaaacccuuggugug

SEQ ID NO: 1793 - RNA, 19 nt, Homo sapiens
acccuuggugugggucuga

SEQ ID NO: 1794 - RNA, 19 nt, Homo sapiens
cccuuggugugggucugag

SEQ ID NO: 1795 - RNA, 19 nt, Homo sapiens
ccuuggugugggucugagg

SEQ ID NO: 1796 - RNA, 19 nt, Homo sapiens
cuuggugugggucugaggu

SEQ ID NO: 1797 - RNA, 19 nt, Homo sapiens
uggugugggucugaggucu

SEQ ID NO: 1798 - RNA, 19 nt, Homo sapiens
ggugugggucugaggucuu

SEQ ID NO: 1799 - RNA, 19 nt, Homo sapiens
gugugggucugaggucuug

SEQ ID NO: 1800 - RNA, 19 nt, Homo sapiens
ugugggucugaggucuuga

SEQ ID NO: 1801 - RNA, 19 nt, Homo sapiens
gugggucugaggucuugac

SEQ ID NO: 1802 - RNA, 19 nt, Homo sapiens
gggucugaggucuugacuc

SEQ ID NO: 1803 - RNA, 19 nt, Homo sapiens
ggucugaggucuugacuca

SEQ ID NO: 1804 - RNA, 19 nt, Homo sapiens
gucugaggucuugacucaa

SEQ ID NO: 1805 - RNA, 19 nt, Homo sapiens
cugaggucuugacucaacg

SEQ ID NO: 1806 - RNA, 19 nt, Homo sapiens
ugaggucuugacucaacga

SEQ ID NO: 1807 - RNA, 19 nt, Homo sapiens
gaggucuugacucaacgag

SEQ ID NO: 1808 - RNA, 19 nt, Homo sapiens
aggucuugacucaacgaga

SEQ ID NO: 1809 - RNA, 19 nt, Homo sapiens
ggucuugacucaacgagag

SEQ ID NO: 1810 - RNA, 19 nt, Homo sapiens
gucuugacucaacgagagc

SEQ ID NO: 1811 - RNA, 19 nt, Homo sapiens
ucuugacucaacgagagca

SEQ ID NO: 1812 - RNA, 19 nt, Homo sapiens
cuugacucaacgagagcac

SEQ ID NO: 1813 - RNA, 19 nt, Homo sapiens
uugacucaacgagagcacu

SEQ ID NO: 1814 - RNA, 19 nt, Homo sapiens
ugacucaacgagagcacuu

SEQ ID NO: 1815 - RNA, 19 nt, Homo sapiens
gacucaacgagagcacuug

SEQ ID NO: 1816 - RNA, 19 nt, Homo sapiens
acucaacgagagcacuuga

SEQ ID NO: 1817 - RNA, 19 nt, Homo sapiens
cucaacgagagcacuugaa

SEQ ID NO: 1818 - RNA, 19 nt, Homo sapiens
ucaacgagagcacuugaaa

SEQ ID NO: 1819 - RNA, 19 nt, Homo sapiens
caacgagagcacuugaaaa

SEQ ID NO: 1820 - RNA, 19 nt, Homo sapiens
aacgagagcacuugaaaau

SEQ ID NO: 1821 - RNA, 19 nt, Homo sapiens
acgagagcacuugaaaaug

SEQ ID NO: 1822 - RNA, 19 nt, Homo sapiens
cgagagcacuugaaaauga

SEQ ID NO: 1823 - RNA, 19 nt, Homo sapiens
gagagcacuugaaaaugaa

SEQ ID NO: 1824 - RNA, 19 nt, Homo sapiens
agagcacuugaaaaugaaa

SEQ ID NO: 1825 - RNA, 19 nt, Homo sapiens
gagcacuugaaaaugaaau

SEQ ID NO: 1826 - RNA, 19 nt, Homo sapiens
agcacuugaaaaugaaaug

SEQ ID NO: 1827 - RNA, 19 nt, Homo sapiens
gcacuugaaaaugaaauga

SEQ ID NO: 1828 - RNA, 19 nt, Homo sapiens
cacuugaaaaugaaaugac

SEQ ID NO: 1829 - RNA, 19 nt, Homo sapiens
acuugaaaaugaaaugacu

SEQ ID NO: 1830 - RNA, 19 nt, Homo sapiens
cuugaaaaugaaaugacug

SEQ ID NO: 1831 - RNA, 19 nt, Homo sapiens
uugaaaaugaaaugacugu

SEQ ID NO: 1832 - RNA, 19 nt, Homo sapiens
ugaaaaugaaaugacuguc

SEQ ID NO: 1833 - RNA, 19 nt, Homo sapiens
gaaaaugaaaugacugucu

SEQ ID NO: 1834 - RNA, 19 nt, Homo sapiens
aaaaugaaaugacugucua

SEQ ID NO: 1835 - RNA, 19 nt, Homo sapiens
aaaugaaaugacugucuaa

SEQ ID NO: 1836 - RNA, 19 nt, Homo sapiens
aaugaaaugacugucuaag

SEQ ID NO: 1837 - RNA, 19 nt, Homo sapiens
augaaaugacugucuaaga

SEQ ID NO: 1838 - RNA, 19 nt, Homo sapiens
ugaaaugacugucuaagag

SEQ ID NO: 1839 - RNA, 19 nt, Homo sapiens
gaaaugacugucuaagaga

SEQ ID NO: 1840 - RNA, 19 nt, Homo sapiens
aaaugacugucuaagagau

SEQ ID NO: 1841 - RNA, 19 nt, Homo sapiens
augacugucuaagagaucu

SEQ ID NO: 1842 - RNA, 19 nt, Homo sapiens
ugacugucuaagagaucug

SEQ ID NO: 1843 - RNA, 19 nt, Homo sapiens
gacugucuaagagaucugg

SEQ ID NO: 1844 - RNA, 19 nt, Homo sapiens
acugucuaagagaucuggu

SEQ ID NO: 1845 - RNA, 19 nt, Homo sapiens
cugucuaagagaucugguc

SEQ ID NO: 1846 - RNA, 19 nt, Homo sapiens
ugucuaagagaucugguca

SEQ ID NO: 1847 - RNA, 19 nt, Homo sapiens
gucuaagagaucuggucaa

SEQ ID NO: 1848 - RNA, 19 nt, Homo sapiens
ucuaagagaucuggucaaa

SEQ ID NO: 1849 - RNA, 19 nt, Homo sapiens
cuaagagaucuggucaaag

SEQ ID NO: 1850 - RNA, 19 nt, Homo sapiens
uaagagaucuggucaaagc

SEQ ID NO: 1851 - RNA, 19 nt, Homo sapiens
aagagaucuggucaaagca

SEQ ID NO: 1852 - RNA, 19 nt, Homo sapiens
agagaucuggucaaagcaa

SEQ ID NO: 1853 - RNA, 19 nt, Homo sapiens
gagaucuggucaaagcaac

SEQ ID NO: 1854 - RNA, 19 nt, Homo sapiens
agaucuggucaaagcaacu

SEQ ID NO: 1855 - RNA, 19 nt, Homo sapiens
gaucuggucaaagcaacug

SEQ ID NO: 1856 - RNA, 19 nt, Homo sapiens
aucuggucaaagcaacugg

SEQ ID NO: 1857 - RNA, 19 nt, Homo sapiens
ucuggucaaagcaacugga

SEQ ID NO: 1858 - RNA, 19 nt, Homo sapiens
cuggucaaagcaacuggau

SEQ ID NO: 1859 - RNA, 19 nt, Homo sapiens
uggucaaagcaacuggaua

SEQ ID NO: 1860 - RNA, 19 nt, Homo sapiens
ggucaaagcaacuggauac

SEQ ID NO: 1861 - RNA, 19 nt, Homo sapiens
gucaaagcaacuggauacu

SEQ ID NO: 1862 - RNA, 19 nt, Homo sapiens
ucaaagcaacuggauacua

SEQ ID NO: 1863 - RNA, 19 nt, Homo sapiens
caaagcaacuggauacuag

SEQ ID NO: 1864 - RNA, 19 nt, Homo sapiens
aaagcaacuggauacuaga

SEQ ID NO: 1865 - RNA, 19 nt, Homo sapiens
aagcaacuggauacuagau

SEQ ID NO: 1866 - RNA, 19 nt, Homo sapiens
agcaacuggauacuagauc

SEQ ID NO: 1867 - RNA, 19 nt, Homo sapiens
gcaacuggauacuagaucu

SEQ ID NO: 1868 - RNA, 19 nt, Homo sapiens
caacuggauacuagaucuu

SEQ ID NO: 1869 - RNA, 19 nt, Homo sapiens
aacuggauacuagaucuua

SEQ ID NO: 1870 - RNA, 19 nt, Homo sapiens
acuggauacuagaucuuac

SEQ ID NO: 1871 - RNA, 19 nt, Homo sapiens
cuggauacuagaucuuaca

SEQ ID NO: 1872 - RNA, 19 nt, Homo sapiens
uggauacuagaucuuacau

SEQ ID NO: 1873 - RNA, 19 nt, Homo sapiens
ggauacuagaucuuacauc

SEQ ID NO: 1874 - RNA, 19 nt, Homo sapiens
gauacuagaucuuacaucu

SEQ ID NO: 1875 - RNA, 19 nt, Homo sapiens
auacuagaucuuacaucug

SEQ ID NO: 1876 - RNA, 19 nt, Homo sapiens
acuagaucuuacaucugca

SEQ ID NO: 1877 - RNA, 19 nt, Homo sapiens
cuagaucuuacaucugcag

SEQ ID NO: 1878 - RNA, 19 nt, Homo sapiens
agaucuuacaucugcagcu

SEQ ID NO: 1879 - RNA, 19 nt, Homo sapiens
gaucuuacaucugcagcuc

SEQ ID NO: 1880 - RNA, 19 nt, Homo sapiens
aucuuacaucugcagcucu

SEQ ID NO: 1881 - RNA, 19 nt, Homo sapiens
ucuuacaucugcagcucuu

SEQ ID NO: 1882 - RNA, 19 nt, Homo sapiens
cuuacaucugcagcucuuu

SEQ ID NO: 1883 - RNA, 19 nt, Homo sapiens
uuacaucugcagcucuuuc

SEQ ID NO: 1884 - RNA, 19 nt, Homo sapiens
uacaucugcagcucuuucu

SEQ ID NO: 1885 - RNA, 19 nt, Homo sapiens
acaucugcagcucuuucuu

SEQ ID NO: 1886 - RNA, 19 nt, Homo sapiens
caucugcagcucuuucuuc

SEQ ID NO: 1887 - RNA, 19 nt, Homo sapiens
aucugcagcucuuucuucu

SEQ ID NO: 1888 - RNA, 19 nt, Homo sapiens
ucugcagcucuuucuucuu

SEQ ID NO: 1889 - RNA, 19 nt, Homo sapiens
cugcagcucuuucuucuuu

SEQ ID NO: 1890 - RNA, 19 nt, Homo sapiens
ugcagcucuuucuucuuug

SEQ ID NO: 1891 - RNA, 19 nt, Homo sapiens
gcagcucuuucuucuuuga

SEQ ID NO: 1892 - RNA, 19 nt, Homo sapiens
cagcucuuucuucuuugaa

SEQ ID NO: 1893 - RNA, 19 nt, Homo sapiens
agcucuuucuucuuugaau

SEQ ID NO: 1894 - RNA, 19 nt, Homo sapiens
gcucuuucuucuuugaauu

SEQ ID NO: 1895 - RNA, 19 nt, Homo sapiens
cucuuucuucuuugaauuu

SEQ ID NO: 1896 - RNA, 19 nt, Homo sapiens
ucuuucuucuuugaauuuc

SEQ ID NO: 1897 - RNA, 19 nt, Homo sapiens
cuuucuucuuugaauuucc

SEQ ID NO: 1898 - RNA, 19 nt, Homo sapiens
uuucuucuuugaauuuccu

SEQ ID NO: 1899 - RNA, 19 nt, Homo sapiens
uucuucuuugaauuuccua

SEQ ID NO: 1900 - RNA, 19 nt, Homo sapiens
ucuucuuugaauuuccuau

SEQ ID NO: 1901 - RNA, 19 nt, Homo sapiens
uucuuugaauuuccuaucu

SEQ ID NO: 1902 - RNA, 19 nt, Homo sapiens
ucuuugaauuuccuaucug

SEQ ID NO: 1903 - RNA, 19 nt, Homo sapiens
cuuugaauuuccuaucugu

SEQ ID NO: 1904 - RNA, 19 nt, Homo sapiens
uuugaauuuccuaucugua

SEQ ID NO: 1905 - RNA, 19 nt, Homo sapiens
uugaauuuccuaucuguau

SEQ ID NO: 1906 - RNA, 19 nt, Homo sapiens
ugaauuuccuaucuguaug

SEQ ID NO: 1907 - RNA, 19 nt, Homo sapiens
gaauuuccuaucuguaugu

SEQ ID NO: 1908 - RNA, 19 nt, Homo sapiens
auuuccuaucuguaugucu

SEQ ID NO: 1909 - RNA, 19 nt, Homo sapiens
uuuccuaucuguaugucug

SEQ ID NO: 1910 - RNA, 19 nt, Homo sapiens
uuccuaucuguaugucugc

SEQ ID NO: 1911 - RNA, 19 nt, Homo sapiens
uccuaucuguaugucugcc

SEQ ID NO: 1912 - RNA, 19 nt, Homo sapiens
ccuaucuguaugucugccu

SEQ ID NO: 1913 - RNA, 19 nt, Homo sapiens
cuaucuguaugucugccua

SEQ ID NO: 1914 - RNA, 19 nt, Homo sapiens
uaucuguaugucugccuaa

SEQ ID NO: 1915 - RNA, 19 nt, Homo sapiens
aucuguaugucugccuaau

SEQ ID NO: 1916 - RNA, 19 nt, Homo sapiens
ucuguaugucugccuaauu

SEQ ID NO: 1917 - RNA, 19 nt, Homo sapiens
cuguaugucugccuaauua

SEQ ID NO: 1918 - RNA, 19 nt, Homo sapiens
uguaugucugccuaauuaa

SEQ ID NO: 1919 - RNA, 19 nt, Homo sapiens
guaugucugccuaauuaaa

SEQ ID NO: 1920 - RNA, 19 nt, Homo sapiens
uaugucugccuaauuaaaa

SEQ ID NO: 1921 - RNA, 19 nt, Homo sapiens
augucugccuaauuaaaaa

SEQ ID NO: 1922 - RNA, 19 nt, Homo sapiens
ugucugccuaauuaaaaaa

SEQ ID NO: 1923 - RNA, 19 nt, Homo sapiens
gucugccuaauuaaaaaaa

SEQ ID NO: 1924 - RNA, 19 nt, Homo sapiens
ucugccuaauuaaaaaaau

SEQ ID NO: 1925 - RNA, 19 nt, Homo sapiens
cugccuaauuaaaaaaaua

SEQ ID NO: 1926 - RNA, 19 nt, Homo sapiens
ugccuaauuaaaaaaauau

SEQ ID NO: 1927 - RNA, 19 nt, Homo sapiens
gccuaauuaaaaaaauaua

SEQ ID NO: 1928 - RNA, 19 nt, Homo sapiens
ccuaauuaaaaaaauauau

SEQ ID NO: 1929 - RNA, 19 nt, Homo sapiens
cuaauuaaaaaaauauaua

SEQ ID NO: 1930 - RNA, 19 nt, Homo sapiens
uaaaaaaauauauauugua

SEQ ID NO: 1931 - RNA, 21 nt, Artificial Sequence
  siRNA sense strand against APCS
  modified_base (1)..(1): 2'-fluorouracil
  modified_base (2)..(2): 2'-O-methyladenosine
  modified_base (3)..(3): 2'-fluorocytosine
  modified_base (4)..(4): cm
  modified_base (5)..(5): 2'-fluorouracil
  modified_base (6)..(6): um
  modified_base (7)..(7): 2'-fluoroguanine
  modified_base (8)..(8): um
  modified_base (9)..(9): 2'-fluoroguanine
  modified_base (10)..(10): um
  modified_base (11)..(12): 2'-fluorouracil
  modified_base (13)..(13): um
  modified_base (14)..(14): 2'-fluorocytosine
  modified_base (15)..(15): gm
  modified_base (16)..(16): 2'-fluoroadenine
  modified_base (17)..(17): gm
  modified_base (18)..(18): 2'-fluorocytosine
  modified_base (19)..(19): cm
  modified_base (20)..(20): 2'-fluorouracil
  modified_base (21)..(21): 2'-O-methyladenosine
uaccuuguguuuucgagccua

SEQ ID NO: 1932 - RNA, 21 nt, Artificial Sequence
  siRNA sense strand against APCS
  modified_base (1)..(1): 2'-fluorouracil
  modified_base (2)..(2): gm
  modified_base (3)..(3): 2'-fluorocytosine
  modified_base (4)..(4): cm
  modified_base (5)..(5): 2'-fluorouracil
  modified_base (6)..(6): 2'-O-methyladenosine
  modified_base (7)..(7): 2'-fluorocytosine
  modified_base (8)..(8): 2'-O-methyladenosine
  modified_base (9)..(9): 2'-fluoroguanine
  modified_base (10)..(10): cm
  modified_base (11)..(11): 2'-fluorocytosine
  modified_base (12)..(12): 2'-fluorouracil
  modified_base (13)..(13): cm
  modified_base (14)..(14): 2'-fluorouracil
  modified_base (15)..(15): um
  modified_base (16)..(16): 2'-fluorocytosine
  modified_base (17)..(17): um
  modified_base (18)..(18): 2'-fluorocytosine
  modified_base (19)..(19): cm
  modified_base (20)..(20): 2'-fluorouracil
  modified_base (21)..(21): 2'-O-methyladenosine
ugccuacagccucuucuccua

SEQ ID NO: 1933 - RNA, 21 nt, Artificial Sequence
  siRNA sense strand against APCS
  modified_base (1)..(1): 2'-fluoroadenine
  modified_base (2)..(2): cm
  modified_base (3)..(3): 2'-fluoroadenine
  modified_base (4)..(4): gm
  modified_base (5)..(5): 2'-fluorocytosine
  modified_base (6)..(6): cm
  modified_base (7)..(7): 2'-fluorouracil
  modified_base (8)..(8): cm
  modified_base (9)..(9): 2'-fluorouracil
  modified_base (10)..(10): um
  modified_base (11)..(11): 2'-fluorocytosine
  modified_base (12)..(12): 2'-fluorouracil
  modified_base (13)..(13): cm
  modified_base (14)..(14): 2'-fluorocytosine
  modified_base (15)..(15): um
  modified_base (16)..(16): 2'-fluoroadenine
  modified_base (17)..(17): cm
  modified_base (18)..(18): 2'-fluoroadenine
  modified_base (19)..(19): 2'-O-methyladenosine
  modified_base (20)..(20): 2'-fluorouracil
  modified_base (21)..(21): 2'-O-methyladenosine
acagccucuucuccuacaaua

SEQ ID NO: 1934 - RNA, 21 nt, Artificial Sequence
  siRNA sense strand against APCS
  modified_base (1)..(1): 2'-fluoroguanine
  modified_base (2)..(2): um
  modified_base (3)..(3): 2'-fluorocytosine
  modified_base (4)..(4): cm
  modified_base (5)..(5): 2'-fluorouracil
  modified_base (6)..(6): cm
  modified_base (7)..(7): 2'-fluoroadenine
  modified_base (8)..(8): um
  modified_base (9)..(9): 2'-fluorocytosine
  modified_base (10)..(10): 2'-O-methyladenosine
  modified_base (11)..(12): 2'-fluoroguanine
  modified_base (13)..(13): um
  modified_base (14)..(14): 2'-fluoroadenine
  modified_base (15)..(15): um
  modified_base (16)..(16): 2'-fluorouracil
  modified_base (17)..(17): gm
  modified_base (18)..(18): 2'-fluorocytosine
  modified_base (19)..(19): um
  modified_base (20)..(20): 2'-fluoroguanine
  modified_base (21)..(21): 2'-O-methyladenosine
guccucaucagguauugcuga

SEQ ID NO: 1935 - RNA, 21 nt, Artificial Sequence
  siRNA sense strand against APCS
  modified_base (1)..(1): 2'-fluoroadenine
  modified_base (2)..(2): gm
  modified_base (3)..(3): 2'-fluoroguanine
  modified_base (4)..(4): 2'-O-methyladenosine
  modified_base (5)..(5): 2'-fluoroguanine
  modified_base (6)..(6): cm
  modified_base (7)..(7): 2'-fluorocytosine
  modified_base (8)..(8): 2'-O-methyladenosine
  modified_base (9)..(9): 2'-fluoroguanine
  modified_base (10)..(10): um
  modified_base (11)..(12): 2'-fluorocytosine
  modified_base (13)..(13): um
  modified_base (14)..(14): 2'-fluorouracil
  modified_base (15)..(15): um
  modified_base (16)..(16): 2'-fluoroguanine
  modified_base (17)..(17): um
  modified_base (18)..(18): 2'-fluoroguanine
  modified_base (19)..(19): gm
  modified_base (20)..(20): 2'-fluoroguanine
  modified_base (21)..(21): 2'-O-methyladenosine
aggagccaguccuuuguggga

SEQ ID NO: 1936 - RNA, 21 nt, Artificial Sequence
  siRNA sense strand against APCS
  modified_base (1)..(1): 2'-fluoroguanine
  modified_base (2)..(2): 2'-O-methyladenosine
  modified_base (3)..(3): 2'-fluoroguanine
  modified_base (4)..(4): cm
  modified_base (5)..(5): 2'-fluorocytosine
  modified_base (6)..(6): 2'-O-methyladenosine
  modified_base (7)..(7): 2'-fluoroguanine
  modified_base (8)..(8): um
  modified_base (9)..(9): 2'-fluorocytosine
  modified_base (10)..(10): cm
  modified_base (11)..(12): 2'-fluorouracil
  modified_base (13)..(13): um
  modified_base (14)..(14): 2'-fluoroguanine
  modified_base (15)..(15): um
  modified_base (16)..(16): 2'-fluoroguanine
  modified_base (17)..(17): gm
  modified_base (18)..(18): 2'-fluoroguanine
  modified_base (19)..(19): 2'-O-methyladenosine
  modified_base (20)..(20): 2'-fluoroguanine
  modified_base (21)..(21): 2'-O-methyladenosine
gagccaguccuuugugggaga

SEQ ID NO: 1937 - RNA, 21 nt, Artificial Sequence
  siRNA sense strand against APCS
  modified_base (1)..(1): 2'-fluorocytosine
  modified_base (2)..(2): cm
  modified_base (3)..(3): 2'-fluoroadenine
  modified_base (4)..(4): gm
  modified_base (5)..(5): 2'-fluorouracil
  modified_base (6)..(6): cm
  modified_base (7)..(7): 2'-fluorocytosine
  modified_base (8)..(8): um
  modified_base (9)..(9): 2'-fluorouracil
  modified_base (10)..(10): um
  modified_base (11)..(11): 2'-fluoroguanine
  modified_base (12)..(12): 2'-fluorouracil
  modified_base (13)..(13): gm
  modified_base (14)..(14): 2'-fluoroguanine
  modified_base (15)..(15): gm
  modified_base (16)..(16): 2'-fluoroadenine
  modified_base (17)..(17): gm
  modified_base (18)..(18): 2'-fluoroadenine
  modified_base (19)..(19): gm
  modified_base (20)..(20): 2'-fluoroadenine
  modified_base (21)..(21): um
ccaguccuuugugggagagau

SEQ ID NO: 1938 - RNA, 21 nt, Artificial Sequence
  siRNA sense strand against APCS
  modified_base (1)..(1): 2'-fluorocytosine
  modified_base (2)..(2): 2'-O-methyladenosine
  modified_base (3)..(3): 2'-fluoroguanine
  modified_base (4)..(4): um
  modified_base (5)..(5): 2'-fluorocytosine
  modified_base (6)..(6): cm
  modified_base (7)..(7): 2'-fluorouracil
  modified_base (8)..(8): um
  modified_base (9)..(9): 2'-fluorouracil
  modified_base (10)..(10): gm
  modified_base (11)..(11): 2'-fluorouracil
  modified_base (12)..(12): 2'-fluoroguanine
  modified_base (13)..(13): gm
  modified_base (14)..(14): 2'-fluoroguanine
  modified_base (15)..(15): 2'-O-methyladenosine
  modified_base (16)..(16): 2'-fluoroguanine
  modified_base (17)..(17): 2'-O-methyladenosine
  modified_base (18)..(18): 2'-fluoroguanine
  modified_base (19)..(19): 2'-O-methyladenosine
  modified_base (20)..(20): 2'-fluorouracil
  modified_base (21)..(21): um
caguccuuugugggagagauu

SEQ ID NO: 1939 - RNA, 21 nt, Artificial Sequence
  siRNA sense strand against APCS
  modified_base (1)..(1): 2'-fluorouracil
  modified_base (2)..(2): gm
  modified_base (3)..(3): 2'-fluoroguanine
  modified_base (4)..(4): gm
  modified_base (5)..(5): 2'-fluoroadenine
  modified_base (6)..(6): gm
  modified_base (7)..(7): 2'-fluoroadenine
  modified_base (8)..(8): gm
  modified_base (9)..(9): 2'-fluoroadenine
  modified_base (10)..(10): um
  modified_base (11)..(11): 2'-fluorouracil
  modified_base (12)..(12): 2'-fluoroguanine
  modified_base (13)..(13): gm
  modified_base (14)..(14): 2'-fluoroguanine
  modified_base (15)..(15): gm
  modified_base (16)..(16): 2'-fluoroadenine
  modified_base (17)..(17): um
  modified_base (18)..(18): 2'-fluorouracil
  modified_base (19)..(19): um
  modified_base (20)..(20): 2'-fluoroguanine
  modified_base (21)..(21): um
ugggagagauuggggauuugu

SEQ ID NO: 1940 - RNA, 21 nt, Artificial Sequence
  siRNA sense strand against APCS
  modified_base (1)..(1): 2'-fluoroguanine
  modified_base (2)..(2): gm
  modified_base (3)..(3): 2'-fluoroguanine
  modified_base (4)..(4): 2'-O-methyladenosine
  modified_base (5)..(5): 2'-fluoroguanine
  modified_base (6)..(6): 2'-O-methyladenosine
  modified_base (7)..(7): 2'-fluoroguanine
  modified_base (8)..(8): 2'-O-methyladenosine
  modified_base (9)..(9): 2'-fluorouracil
  modified_base (10)..(10): um
  modified_base (11)..(12): 2'-fluoroguanine
  modified_base (13)..(13): gm
  modified_base (14)..(14): 2'-fluoroguanine
  modified_base (15)..(15): 2'-O-methyladenosine
  modified_base (16)..(16): 2'-fluorouracil
  modified_base (17)..(17): um
  modified_base (18)..(18): 2'-fluorouracil
  modified_base (19)..(19): gm
  modified_base (20)..(20): 2'-fluorouracil
  modified_base (21)..(21): 2'-O-methyladenosine
gggagagauuggggauuugua

SEQ ID NO: 1941 - RNA, 21 nt, Artificial Sequence
  siRNA sense strand against APCS
  modified_base (1)..(1): 2'-fluoroguanine
  modified_base (2)..(2): 2'-O-methyladenosine
  modified_base (3)..(3): 2'-fluoroguanine
  modified_base (4)..(4): 2'-O-methyladenosine
  modified_base (5)..(5): 2'-fluoroguanine
  modified_base (6)..(6): 2'-O-methyladenosine
  modified_base (7)..(7): 2'-fluorouracil
  modified_base (8)..(8): um
  modified_base (9)..(9): 2'-fluoroguanine
  modified_base (10)..(10): gm
  modified_base (11)..(12): 2'-fluoroguanine
  modified_base (13)..(13): 2'-O-methyladenosine
  modified_base (14)..(14): 2'-fluorouracil
  modified_base (15)..(15): um
  modified_base (16)..(16): 2'-fluorouracil
  modified_base (17)..(17): gm
  modified_base (18)..(18): 2'-fluorouracil
  modified_base (19)..(19): 2'-O-methyladenosine
  modified_base (20)..(20): 2'-fluorocytosine
  modified_base (21)..(21): 2'-O-methyladenosine
gagagauuggggauuuguaca

SEQ ID NO: 1942 - RNA, 21 nt, Artificial Sequence
  siRNA sense strand against APCS
  modified_base (1)..(1): 2'-fluorouracil
  modified_base (2)..(2): cm
  modified_base (3)..(3): 2'-fluorocytosine
  modified_base (4)..(4): um
  modified_base (5)..(5): 2'-fluoroguanine
  modified_base (6)..(6): um
  modified_base (7)..(7): 2'-fluorocytosine
  modified_base (8)..(8): um
  modified_base (9)..(9): 2'-fluoroguanine
  modified_base (10)..(10): cm
  modified_base (11)..(11): 2'-fluorocytosine
  modified_base (12)..(12): 2'-fluorouracil
  modified_base (13)..(13): 2'-O-methyladenosine
  modified_base (14)..(14): 2'-fluorouracil
  modified_base (15)..(15): cm
  modified_base (16)..(16): 2'-fluoroadenine
  modified_base (17)..(17): gm
  modified_base (18)..(18): 2'-fluoroguanine
  modified_base (19)..(19): gm
  modified_base (20)..(20): 2'-fluorouracil
  modified_base (21)..(21): 2'-O-methyladenosine
uccugucugccuaucagggua

SEQ ID NO: 1943 - RNA, 21 nt, Artificial Sequence
  siRNA sense strand against APCS
  modified_base (1)..(1): 2'-fluorocytosine
  modified_base (2)..(2): 2'-O-methyladenosine
  modified_base (3)..(3): 2'-fluoroguanine
  modified_base (4)..(4): gm
  modified_base (5)..(5): 2'-fluorocytosine
  modified_base (6)..(6): um
  modified_base (7)..(7): 2'-fluorocytosine
  modified_base (8)..(8): um
  modified_base (9)..(9): 2'-fluoroguanine
  modified_base (10)..(10): 2'-O-methyladenosine
  modified_base (11)..(11): 2'-fluoroadenine
  modified_base (12)..(12): 2'-fluorocytosine
  modified_base (13)..(13): um
  modified_base (14)..(14): 2'-fluoroadenine
  modified_base (15)..(15): um
  modified_base (16)..(16): 2'-fluoroguanine
  modified_base (17)..(17): 2'-O-methyladenosine
  modified_base (18)..(18): 2'-fluoroadenine
  modified_base (19)..(19): 2'-O-methyladenosine
  modified_base (20)..(20): 2'-fluorouracil
  modified_base (21)..(21): cm
caggcucugaacuaugaaauc

SEQ ID NO: 1944 - RNA, 21 nt, Artificial Sequence
  siRNA sense strand against APCS
  modified_base (1)..(1): 2'-fluoroguanine
  modified_base (2)..(2): 2'-O-methyladenosine
  modified_base (3)..(3): 2'-fluoroguanine
  modified_base (4)..(4): gm
  modified_base (5)..(5): 2'-fluoroadenine
  modified_base (6)..(6): um
  modified_base (7)..(7): 2'-fluoroadenine
  modified_base (8)..(8): um
  modified_base (9)..(9): 2'-fluoroguanine
  modified_base (10)..(10): um
  modified_base (11)..(11): 2'-fluorocytosine
  modified_base (12)..(12): 2'-fluoroadenine
  modified_base (13)..(13): um
  modified_base (14)..(14): 2'-fluorocytosine
  modified_base (15)..(15): 2'-O-methyladenosine
  modified_base (16)..(16): 2'-fluorouracil
  modified_base (17)..(17): cm
  modified_base (18)..(18): 2'-fluoroadenine
  modified_base (19)..(19): 2'-O-methyladenosine
  modified_base (20)..(20): 2'-fluoroadenine
  modified_base (21)..(21): cm
gaggauaugucaucaucaaac

SEQ ID NO: 1945 - RNA, 21 nt, Artificial Sequence
  siRNA sense strand against APCS
  modified_base (1)..(1): 2'-fluorouracil
  modified_base (2)..(2): gm
  modified_base (3)..(3): 2'-fluoroguanine
  modified_base (4)..(4): gm
  modified_base (5)..(5): 2'-fluorouracil
  modified_base (6)..(6): cm
  modified_base (7)..(7): 2'-fluorouracil
  modified_base (8)..(8): gm
  modified_base (9)..(9): 2'-fluoroadenine
  modified_base (10)..(10): gm
  modified_base (11)..(11): 2'-fluoroguanine
  modified_base (12)..(12): 2'-fluorouracil
  modified_base (13)..(13): cm
  modified_base (14)..(14): 2'-fluorouracil
  modified_base (15)..(15): um
  modified_base (16)..(16): 2'-fluoroguanine
  modified_base (17)..(17): 2'-O-methyladenosine
  modified_base (18)..(18): 2'-fluorocytosine
  modified_base (19)..(19): um
  modified_base (20)..(20): 2'-fluorocytosine
  modified_base (21)..(21): 2'-O-methyladenosine
ugggucugaggucuugacuca

SEQ ID NO: 1946 - RNA, 21 nt, Artificial Sequence
  siRNA sense strand against APCS
  modified_base (1)..(1): 2'-fluoroadenine
  modified_base (2)..(2): cm
  modified_base (3)..(3): 2'-fluorouracil
  modified_base (4)..(4): cm
  modified_base (5)..(5): 2'-fluoroadenine
  modified_base (6)..(6): 2'-O-methyladenosine
  modified_base (7)..(7): 2'-fluorocytosine
  modified_base (8)..(8): gm
  modified_base (9)..(9): 2'-fluoroadenine
  modified_base (10)..(10): gm
  modified_base (11)..(11): 2'-fluoroadenine
  modified_base (12)..(12): 2'-fluoroguanine
  modified_base (13)..(13): cm
  modified_base (14)..(14): 2'-fluoroadenine
  modified_base (15)..(15): cm
  modified_base (16)..(16): 2'-fluorouracil
  modified_base (17)..(17): um
  modified_base (18)..(18): 2'-fluoroguanine
  modified_base (19)..(19): 2'-O-methyladenosine
  modified_base (20)..(20): 2'-fluoroadenine
  modified_base (21)..(21): 2'-O-methyladenosine
acucaacgagagcacuugaaa

SEQ ID NO: 1947 - RNA, 21 nt, Artificial Sequence
  siRNA sense strand against APCS
  modified_base (1)..(1): 2'-fluorocytosine
  modified_base (2)..(2): um
  modified_base (3)..(3): 2'-fluorocytosine
  modified_base (4)..(4): 2'-O-methyladenosine
  modified_base (5)..(5): 2'-fluoroadenine
  modified_base (6)..(6): cm
  modified_base (7)..(7): 2'-fluoroguanine
  modified_base (8)..(8): 2'-O-methyladenosine
  modified_base (9)..(9): 2'-fluoroguanine
  modified_base (10)..(10): 2'-O-methyladenosine
  modified_base (11)..(11): 2'-fluoroguanine
  modified_base (12)..(12): 2'-fluorocytosine
  modified_base (13)..(13): 2'-O-methyladenosine
  modified_base (14)..(14): 2'-fluorocytosine
  modified_base (15)..(15): um
  modified_base (16)..(16): 2'-fluorouracil
  modified_base (17)..(17): gm
  modified_base (18)..(18): 2'-fluoroadenine
  modified_base (19)..(19): 2'-O-methyladenosine
  modified_base (20)..(20): 2'-fluoroadenine
  modified_base (21)..(21): 2'-O-methyladenosine
cucaacgagagcacuugaaaa

SEQ ID NO: 1948 - RNA, 21 nt, Artificial Sequence
  siRNA sense strand against APCS
  modified_base (1)..(1): 2'-fluorouracil
  modified_base (2)..(2): cm
  modified_base (3)..(3): 2'-fluoroadenine
  modified_base (4)..(4): 2'-O-methyladenosine
  modified_base (5)..(5): 2'-fluorocytosine
  modified_base (6)..(6): gm
  modified_base (7)..(7): 2'-fluoroadenine
  modified_base (8)..(8): gm
  modified_base (9)..(9): 2'-fluoroadenine
  modified_base (10)..(10): gm
  modified_base (11)..(11): 2'-fluorocytosine
  modified_base (12)..(12): 2'-fluoroadenine
  modified_base (13)..(13): cm
  modified_base (14)..(14): 2'-fluorouracil
  modified_base (15)..(15): um
  modified_base (16)..(16): 2'-fluoroguanine
  modified_base (17)..(17): 2'-O-methyladenosine
  modified_base (18)..(18): 2'-fluoroadenine
  modified_base (19)..(19): 2'-O-methyladenosine
  modified_base (20)..(20): 2'-fluoroadenine
  modified_base (21)..(21): um
ucaacgagagcacuugaaaau

SEQ ID NO: 1949 - RNA, 21 nt, Artificial Sequence
  siRNA sense strand against APCS
  modified_base (1)..(1): 2'-fluoroadenine
  modified_base (2)..(2): 2'-O-methyladenosine
  modified_base (3)..(3): 2'-fluorocytosine
  modified_base (4)..(4): gm
  modified_base (5)..(5): 2'-fluoroadenine
  modified_base (6)..(6): gm
  modified_base (7)..(7): 2'-fluoroadenine
  modified_base (8)..(8): gm
  modified_base (9)..(9): 2'-fluorocytosine
  modified_base (10)..(10): 2'-O-methyladenosine
  modified_base (11)..(11): 2'-fluorocytosine
  modified_base (12)..(12): 2'-fluorouracil
  modified_base (13)..(13): um
  modified_base (14)..(14): 2'-fluoroguanine
  modified_base (15)..(15): 2'-O-methyladenosine
  modified_base (16)..(16): 2'-fluoroadenine
  modified_base (17)..(17): 2'-O-methyladenosine
  modified_base (18)..(18): 2'-fluoroadenine
  modified_base (19)..(19): um
  modified_base (20)..(20): 2'-fluoroguanine
  modified_base (21)..(21): 2'-O-methyladenosine
aacgagagcacuugaaaauga

SEQ ID NO: 1950 - RNA, 21 nt, Artificial Sequence
  siRNA sense strand against APCS
  modified_base (1)..(1): 2'-fluoroadenine
  modified_base (2)..(2): cm
  modified_base (3)..(3): 2'-fluoroguanine
  modified_base (4)..(4): 2'-O-methyladenosine
  modified_base (5)..(5): 2'-fluoroguanine
  modified_base (6)..(6): 2'-O-methyladenosine
  modified_base (7)..(7): 2'-fluoroguanine
  modified_base (8)..(8): cm
  modified_base (9)..(9): 2'-fluoroadenine
  modified_base (10)..(10): cm
  modified_base (11)..(12): 2'-fluorouracil
  modified_base (13)..(13): gm
  modified_base (14)..(14): 2'-fluoroadenine
  modified_base (15)..(15): 2'-O-methyladenosine
  modified_base (16)..(16): 2'-fluoroadenine
  modified_base (17)..(17): 2'-O-methyladenosine
  modified_base (18)..(18): 2'-fluorouracil
  modified_base (19)..(19): gm
  modified_base (20)..(20): 2'-fluoroadenine
  modified_base (21)..(21): 2'-O-methyladenosine
acgagagcacuugaaaaugaa

SEQ ID NO: 1951 - RNA, 21 nt, Artificial Sequence
  siRNA sense strand against APCS
  modified_base (1)..(1): 2'-fluorocytosine
  modified_base (2)..(2): gm
  modified_base (3)..(3): 2'-fluoroadenine
  modified_base (4)..(4): gm
  modified_base (5)..(5): 2'-fluoroadenine
  modified_base (6)..(6): gm
  modified_base (7)..(7): 2'-fluorocytosine
  modified_base (8)..(8): 2'-O-methyladenosine
  modified_base (9)..(9): 2'-fluorocytosine
  modified_base (10)..(10): um
  modified_base (11)..(11): 2'-fluorouracil
  modified_base (12)..(12): 2'-fluoroguanine
  modified_base (13)..(13): 2'-O-methyladenosine
  modified_base (14)..(14): 2'-fluoroadenine
  modified_base (15)..(15): 2'-O-methyladenosine
  modified_base (16)..(16): 2'-fluoroadenine
  modified_base (17)..(17): um
  modified_base (18)..(18): 2'-fluoroguanine
  modified_base (19)..(19): 2'-O-methyladenosine
  modified_base (20)..(20): 2'-fluoroadenine
  modified_base (21)..(21): 2'-O-methyladenosine
cgagagcacuugaaaaugaaa

SEQ ID NO: 1952 - RNA, 21 nt, Artificial Sequence
  siRNA sense strand against APCS
  modified_base (1)..(1): 2'-fluoroguanine
  modified_base (2)..(2): 2'-O-methyladenosine
  modified_base (3)..(3): 2'-fluoroguanine
  modified_base (4)..(4): 2'-O-methyladenosine
  modified_base (5)..(5): 2'-fluoroguanine
  modified_base (6)..(6): cm
  modified_base (7)..(7): 2'-fluoroadenine
  modified_base (8)..(8): cm
  modified_base (9)..(9): 2'-fluorouracil
  modified_base (10)..(10): um
  modified_base (11)..(11): 2'-fluoroguanine
  modified_base (12)..(12): 2'-fluoroadenine
  modified_base (13)..(13): 2'-O-methyladenosine
  modified_base (14)..(14): 2'-fluoroadenine
  modified_base (15)..(15): 2'-O-methyladenosine
  modified_base (16)..(16): 2'-fluorouracil
  modified_base (17)..(17): gm
  modified_base (18)..(18): 2'-fluoroadenine
  modified_base (19)..(19): 2'-O-methyladenosine
  modified_base (20)..(20): 2'-fluoroadenine
  modified_base (21)..(21): um
gagagcacuugaaaaugaaau

SEQ ID NO: 1953 - RNA, 21 nt, Artificial Sequence
  siRNA sense strand against APCS
  modified_base (1)..(1): 2'-fluoroadenine
  modified_base (2)..(2): gm
  modified_base (3)..(3): 2'-fluoroadenine
  modified_base (4)..(4): gm
  modified_base (5)..(5): 2'-fluorocytosine
  modified_base (6)..(6): 2'-O-methyladenosine
  modified_base (7)..(7): 2'-fluorocytosine
  modified_base (8)..(8): um
  modified_base (9)..(9): 2'-fluorouracil
  modified_base (10)..(10): gm
  modified_base (11)..(12): 2'-fluoroadenine
  modified_base (13)..(13): 2'-O-methyladenosine
  modified_base (14)..(14): 2'-fluoroadenine
  modified_base (15)..(15): um
  modified_base (16)..(16): 2'-fluoroguanine
  modified_base (17)..(17): 2'-O-methyladenosine
  modified_base (18)..(18): 2'-fluoroadenine
  modified_base (19)..(19): 2'-O-methyladenosine
  modified_base (20)..(20): 2'-fluorouracil
  modified_base (21)..(21): gm
agagcacuugaaaaugaaaug

SEQ ID NO: 1954 - RNA, 21 nt, Artificial Sequence
  siRNA sense strand against APCS
  modified_base (1)..(1): 2'-fluorocytosine
  modified_base (2)..(2): um
  modified_base (3)..(3): 2'-fluoroadenine
  modified_base (4)..(4): 2'-O-methyladenosine
  modified_base (5)..(5): 2'-fluoroguanine
  modified_base (6)..(6): 2'-O-methyladenosine
  modified_base (7)..(7): 2'-fluoroguanine
  modified_base (8)..(8): 2'-O-methyladenosine
  modified_base (9)..(9): 2'-fluorouracil
  modified_base (10)..(10): cm
  modified_base (11)..(11): 2'-fluorouracil
  modified_base (12)..(12): 2'-fluoroguanine
  modified_base (13)..(13): gm
  modified_base (14)..(14): 2'-fluorouracil
  modified_base (15)..(15): cm
  modified_base (16)..(16): 2'-fluoroadenine
  modified_base (17)..(17): 2'-O-methyladenosine
  modified_base (18)..(18): 2'-fluoroadenine
  modified_base (19)..(19): gm
  modified_base (20)..(20): 2'-fluorocytosine
  modified_base (21)..(21): 2'-O-methyladenosine
cuaagagaucuggucaaagca

SEQ ID NO: 1955 - RNA, 21 nt, Artificial Sequence
  siRNA sense strand against APCS
  modified_base (1)..(1): 2'-fluorocytosine
  modified_base (2)..(2): um
  modified_base (3)..(3): 2'-fluoroguanine
  modified_base (4)..(4): gm
  modified_base (5)..(5): 2'-fluorouracil
  modified_base (6)..(6): cm
  modified_base (7)..(7): 2'-fluoroadenine
  modified_base (8)..(8): 2'-O-methyladenosine
  modified_base (9)..(9): 2'-fluoroadenine
  modified_base (10)..(10): gm
  modified_base (11)..(11): 2'-fluorocytosine
  modified_base (12)..(12): 2'-fluoroadenine
  modified_base (13)..(13): 2'-O-methyladenosine
  modified_base (14)..(14): 2'-fluorocytosine
  modified_base (15)..(15): um
  modified_base (16)..(16): 2'-fluoroguanine
  modified_base (17)..(17): gm
  modified_base (18)..(18): 2'-fluoroadenine
  modified_base (19)..(19): um
  modified_base (20)..(20): 2'-fluoroadenine
  modified_base (21)..(21): cm
cuggucaaagcaacuggauac

SEQ ID NO: 1956 - RNA, 21 nt, Artificial Sequence
  siRNA sense strand against APCS
  modified_base (1)..(1): 2'-fluoroadenine
  modified_base (2)..(2): 2'-O-methyladenosine
  modified_base (3)..(3): 2'-fluoroguanine
  modified_base (4)..(4): cm
  modified_base (5)..(5): 2'-fluoroadenine
  modified_base (6)..(6): 2'-O-methyladenosine
  modified_base (7)..(7): 2'-fluorocytosine
  modified_base (8)..(8): um
  modified_base (9)..(9): 2'-fluoroguanine
  modified_base (10)..(10): gm
  modified_base (11)..(11): 2'-fluoroadenine
  modified_base (12)..(12): 2'-fluorouracil
  modified_base (13)..(13): 2'-O-methyladenosine
  modified_base (14)..(14): 2'-fluorocytosine
  modified_base (15)..(15): um
  modified_base (16)..(16): 2'-fluoroadenine
  modified_base (17)..(17): gm
  modified_base (18)..(18): 2'-fluoroadenine
  modified_base (19)..(19): um
  modified_base (20)..(20): 2'-fluorocytosine
  modified_base (21)..(21): um
aagcaacuggauacuagaucu

SEQ ID NO: 1957 - RNA, 21 nt, Artificial Sequence
  siRNA sense strand against APCS
  modified_base (1)..(1): 2'-fluoroadenine
  modified_base (2)..(2): gm
  modified_base (3)..(3): 2'-fluorocytosine
  modified_base (4)..(4): 2'-O-methyladenosine
  modified_base (5)..(5): 2'-fluoroadenine
  modified_base (6)..(6): cm
  modified_base (7)..(7): 2'-fluorouracil
  modified_base (8)..(8): gm
  modified_base (9)..(9): 2'-fluoroguanine
  modified_base (10)..(10): 2'-O-methyladenosine
  modified_base (11)..(11): 2'-fluorouracil
  modified_base (12)..(12): 2'-fluoroadenine
  modified_base (13)..(13): cm
  modified_base (14)..(14): 2'-fluorouracil
  modified_base (15)..(15): 2'-O-methyladenosine
  modified_base (16)..(16): 2'-fluoroguanine
  modified_base (17)..(17): 2'-O-methyladenosine
  modified_base (18)..(18): 2'-fluorouracil
  modified_base (19)..(19): cm
  modified_base (20)..(20): 2'-fluorouracil
  modified_base (21)..(21): um
agcaacuggauacuagaucuu

SEQ ID NO: 1958 - RNA, 21 nt, Artificial Sequence
  siRNA sense strand against APCS
  modified_base (1)..(1): 2'-fluoroguanine
  modified_base (2)..(2): cm
  modified_base (3)..(3): 2'-fluoroadenine
  modified_base (4)..(4): 2'-O-methyladenosine
  modified_base (5)..(5): 2'-fluorocytosine
  modified_base (6)..(6): um
  modified_base (7)..(7): 2'-fluoroguanine
  modified_base (8)..(8): gm
  modified_base (9)..(9): 2'-fluoroadenine
  modified_base (10)..(10): um
  modified_base (11)..(11): 2'-fluoroadenine
  modified_base (12)..(12): 2'-fluorocytosine
  modified_base (13)..(13): um
  modified_base (14)..(14): 2'-fluoroadenine
  modified_base (15)..(15): gm
  modified_base (16)..(16): 2'-fluoroadenine
  modified_base (17)..(17): um
  modified_base (18)..(18): 2'-fluorocytosine
  modified_base (19)..(19): um
  modified_base (20)..(20): 2'-fluorouracil
  modified_base (21)..(21): 2'-O-methyladenosine
gcaacuggauacuagaucuua

SEQ ID NO: 1959 - RNA, 21 nt, Artificial Sequence
  siRNA sense strand against APCS
  modified_base (1)..(1): 2'-fluoroadenine
  modified_base (2)..(2): um
  modified_base (3)..(3): 2'-fluorocytosine
  modified_base (4)..(4): um
  modified_base (5)..(5): 2'-fluorouracil
  modified_base (6)..(6): 2'-O-methyladenosine
  modified_base (7)..(7): 2'-fluorocytosine
  modified_base (8)..(8): 2'-O-methyladenosine
  modified_base (9)..(9): 2'-fluorouracil
  modified_base (10)..(10): cm
  modified_base (11)..(11): 2'-fluorouracil
  modified_base (12)..(12): 2'-fluoroguanine
  modified_base (13)..(13): cm
  modified_base (14)..(14): 2'-fluoroadenine
  modified_base (15)..(15): gm
  modified_base (16)..(16): 2'-fluorocytosine
  modified_base (17)..(17): um
  modified_base (18)..(18): 2'-fluorocytosine
  modified_base (19)..(19): um
  modified_base (20)..(20): 2'-fluorouracil
  modified_base (21)..(21): um
aucuuacaucugcagcucuuu

SEQ ID NO: 1960 - RNA, 21 nt, Artificial Sequence
  siRNA sense strand against APCS
  modified_base (1)..(1): 2'-fluorouracil
  modified_base (2)..(2): 2'-O-methyladenosine
  modified_base (3)..(3): 2'-fluorocytosine
  modified_base (4)..(4): 2'-O-methyladenosine
  modified_base (5)..(5): 2'-fluorouracil
  modified_base (6)..(6): cm
  modified_base (7)..(7): 2'-fluorouracil
  modified_base (8)..(8): gm
  modified_base (9)..(9): 2'-fluorocytosine
  modified_base (10)..(10): 2'-O-methyladenosine
  modified_base (11)..(11): 2'-fluoroguanine
  modified_base (12)..(12): 2'-fluorocytosine
  modified_base (13)..(13): um
  modified_base (14)..(14): 2'-fluorocytosine
  modified_base (15)..(15): um
  modified_base (16)..(16): 2'-fluorouracil
  modified_base (17)..(17): um
  modified_base (18)..(18): 2'-fluorocytosine
  modified_base (19)..(19): um
  modified_base (20)..(20): 2'-fluorouracil
  modified_base (21)..(21): cm
uacaucugcagcucuuucuuc

SEQ ID NO: 1961 - RNA, 21 nt, Artificial Sequence
  siRNA sense strand against APCS
  modified_base (1)..(1): 2'-fluoroadenine
  modified_base (2)..(2): cm
  modified_base (3)..(3): 2'-fluoroadenine
  modified_base (4)..(4): um
  modified_base (5)..(5): 2'-fluorocytosine
  modified_base (6)..(6): um
  modified_base (7)..(7): 2'-fluoroguanine
  modified_base (8)..(8): cm
  modified_base (9)..(9): 2'-fluoroadenine
  modified_base (10)..(10): gm
  modified_base (11)..(11): 2'-fluorocytosine
  modified_base (12)..(12): 2'-fluorouracil
  modified_base (13)..(13): cm
  modified_base (14)..(14): 2'-fluorouracil
  modified_base (15)..(15): um
  modified_base (16)..(16): 2'-fluorouracil
  modified_base (17)..(17): cm
  modified_base (18)..(18): 2'-fluorouracil
  modified_base (19)..(19): um
  modified_base (20)..(20): 2'-fluorocytosine
  modified_base (21)..(21): um
acaucugcagcucuuucuucu

SEQ ID NO: 1962 - RNA, 21 nt, Artificial Sequence
  siRNA sense strand against APCS
  modified_base (1)..(1): 2'-fluorocytosine
  modified_base (2)..(2): 2'-O-methyladenosine
  modified_base (3)..(3): 2'-fluorouracil
  modified_base (4)..(4): cm
  modified_base (5)..(5): 2'-fluorouracil
  modified_base (6)..(6): gm
  modified_base (7)..(7): 2'-fluorocytosine
  modified_base (8)..(8): 2'-O-methyladenosine
  modified_base (9)..(9): 2'-fluoroguanine
  modified_base (10)..(10): cm
  modified_base (11)..(11): 2'-fluorouracil
  modified_base (12)..(12): 2'-fluorocytosine
  modified_base (13)..(13): um
  modified_base (14)..(14): 2'-fluorouracil
  modified_base (15)..(15): um
  modified_base (16)..(16): 2'-fluorocytosine
  modified_base (17)..(17): um
  modified_base (18)..(18): 2'-fluorouracil
  modified_base (19)..(19): cm
  modified_base (20)..(20): 2'-fluorouracil
  modified_base (21)..(21): um
caucugcagcucuuucuucuu

SEQ ID NO: 1963 - RNA, 21 nt, Artificial Sequence
  siRNA sense strand against APCS
  modified_base (1)..(1): 2'-fluoroadenine
  modified_base (2)..(2): um
  modified_base (3)..(3): 2'-fluorocytosine
  modified_base (4)..(4): um
  modified_base (5)..(5): 2'-fluoroguanine
  modified_base (6)..(6): cm
  modified_base (7)..(7): 2'-fluoroadenine
  modified_base (8)..(8): gm
  modified_base (9)..(9): 2'-fluorocytosine
  modified_base (10)..(10): um
  modified_base (11)..(11): 2'-fluorocytosine
  modified_base (12)..(12): 2'-fluorouracil
  modified_base (13)..(13): um
  modified_base (14)..(14): 2'-fluorouracil
  modified_base (15)..(15): cm
  modified_base (16)..(16): 2'-fluorouracil
  modified_base (17)..(17): um
  modified_base (18)..(18): 2'-fluorocytosine
  modified_base (19)..(19): um
  modified_base (20)..(20): 2'-fluorouracil
  modified_base (21)..(21): um
aucugcagcucuuucuucuuu

SEQ ID NO: 1964 - RNA, 21 nt, Artificial Sequence
  siRNA sense strand against APCS
  modified_base (1)..(1): 2'-fluorouracil
  modified_base (2)..(2): cm
  modified_base (3)..(3): 2'-fluorouracil
  modified_base (4)..(4): gm
  modified_base (5)..(5): 2'-fluorocytosine
  modified_base (6)..(6): 2'-O-methyladenosine
  modified_base (7)..(7): 2'-fluoroguanine
  modified_base (8)..(8): cm
  modified_base (9)..(9): 2'-fluorouracil
  modified_base (10)..(10): cm
  modified_base (11)..(12): 2'-fluorouracil
  modified_base (13)..(13): um
  modified_base (14)..(14): 2'-fluorocytosine
  modified_base (15)..(15): um
  modified_base (16)..(16): 2'-fluorouracil
  modified_base (17)..(17): cm
  modified_base (18)..(18): 2'-fluorouracil
  modified_base (19)..(19): um
  modified_base (20)..(20): 2'-fluorouracil
  modified_base (21)..(21): gm
ucugcagcucuuucuucuuug

SEQ ID NO: 1965 - RNA, 21 nt, Artificial Sequence
  siRNA sense strand against APCS
  modified_base (1)..(1): 2'-fluorocytosine
  modified_base (2)..(2): um
  modified_base (3)..(3): 2'-fluoroguanine
  modified_base (4)..(4): cm
  modified_base (5)..(5): 2'-fluoroadenine
  modified_base (6)..(6): gm
  modified_base (7)..(7): 2'-fluorocytosine
  modified_base (8)..(8): um
  modified_base (9)..(9): 2'-fluorocytosine
  modified_base (10)..(10): um
  modified_base (11)..(12): 2'-fluorouracil
  modified_base (13)..(13): cm
  modified_base (14)..(14): 2'-fluorouracil
  modified_base (15)..(15): um
  modified_base (16)..(16): 2'-fluorocytosine
  modified_base (17)..(17): um
  modified_base (18)..(18): 2'-fluorouracil
  modified_base (19)..(19): um
  modified_base (20)..(20): 2'-fluoroguanine
  modified_base (21)..(21): 2'-O-methyladenosine
cugcagcucuuucuucuuuga

SEQ ID NO: 1966 - RNA, 21 nt, Artificial Sequence
  siRNA sense strand against APCS
  modified_base (1)..(1): 2'-fluorouracil
  modified_base (2)..(2): gm
  modified_base (3)..(3): 2'-fluorocytosine
  modified_base (4)..(4): 2'-O-methyladenosine
  modified_base (5)..(5): 2'-fluoroguanine
  modified_base (6)..(6): cm
  modified_base (7)..(7): 2'-fluorouracil
  modified_base (8)..(8): cm
  modified_base (9)..(9): 2'-fluorouracil
  modified_base (10)..(10): um
  modified_base (11)..(11): 2'-fluorouracil
  modified_base (12)..(12): 2'-fluorocytosine
  modified_base (13)..(13): um
  modified_base (14)..(14): 2'-fluorouracil
  modified_base (15)..(15): cm
  modified_base (16)..(16): 2'-fluorouracil
  modified_base (17)..(17): um
  modified_base (18)..(18): 2'-fluorouracil
  modified_base (19)..(19): gm
  modified_base (20)..(20): 2'-fluoroadenine
  modified_base (21)..(21): 2'-O-methyladenosine
ugcagcucuuucuucuuugaa

SEQ ID NO: 1967 - RNA, 21 nt, Artificial Sequence
  siRNA sense strand against APCS
  modified_base (1)..(1): 2'-fluoroguanine
  modified_base (2)..(2): cm
  modified_base (3)..(3): 2'-fluoroadenine
  modified_base (4)..(4): gm
  modified_base (5)..(5): 2'-fluorocytosine
  modified_base (6)..(6): um
  modified_base (7)..(7): 2'-fluorocytosine
  modified_base (8)..(8): um
  modified_base (9)..(9): 2'-fluorouracil
  modified_base (10)..(10): um
  modified_base (11)..(11): 2'-fluorocytosine
  modified_base (12)..(12): 2'-fluorouracil
  modified_base (13)..(13): um
  modified_base (14)..(14): 2'-fluorocytosine
  modified_base (15)..(15): um
  modified_base (16)..(16): 2'-fluorouracil
  modified_base (17)..(17): um
  modified_base (18)..(18): 2'-fluoroguanine
  modified_base (19)..(19): 2'-O-methyladenosine
  modified_base (20)..(20): 2'-fluoroadenine
  modified_base (21)..(21): um
gcagcucuuucuucuuugaau

SEQ ID NO: 1968 - RNA, 21 nt, Artificial Sequence
  siRNA sense strand against APCS
  modified_base (1)..(1): 2'-fluorocytosine
  modified_base (2)..(2): 2'-O-methyladenosine
  modified_base (3)..(3): 2'-fluoroguanine
  modified_base (4)..(4): cm
  modified_base (5)..(5): 2'-fluorouracil
  modified_base (6)..(6): cm
  modified_base (7)..(7): 2'-fluorouracil
  modified_base (8)..(8): um
  modified_base (9)..(9): 2'-fluorouracil
  modified_base (10)..(10): cm
  modified_base (11)..(12): 2'-fluorouracil
  modified_base (13)..(13): cm
  modified_base (14)..(14): 2'-fluorouracil
  modified_base (15)..(15): um
  modified_base (16)..(16): 2'-fluorouracil
  modified_base (17)..(17): gm
  modified_base (18)..(18): 2'-fluoroadenine
  modified_base (19)..(19): 2'-O-methyladenosine
  modified_base (20)..(20): 2'-fluorouracil
  modified_base (21)..(21): um
cagcucuuucuucuuugaauu

SEQ ID NO: 1969 - RNA, 21 nt, Artificial Sequence
  siRNA sense strand against APCS
  modified_base (1)..(1): 2'-fluorouracil
  modified_base (2)..(2): um
  modified_base (3)..(3): 2'-fluoroguanine
  modified_base (4)..(4): 2'-O-methyladenosine
  modified_base (5)..(5): 2'-fluoroadenine
  modified_base (6)..(6): um
  modified_base (7)..(7): 2'-fluorouracil
  modified_base (8)..(8): um
  modified_base (9)..(9): 2'-fluorocytosine
  modified_base (10)..(10): cm
  modified_base (11)..(11): 2'-fluorouracil
  modified_base (12)..(12): 2'-fluoroadenine
  modified_base (13)..(13): um
  modified_base (14)..(14): 2'-fluorocytosine
  modified_base (15)..(15): um
  modified_base (16)..(16): 2'-fluoroguanine
  modified_base (17)..(17): um
  modified_base (18)..(18): 2'-fluoroadenine
  modified_base (19)..(19): um
  modified_base (20)..(20): 2'-fluoroguanine
  modified_base (21)..(21): um
uugaauuuccuaucuguaugu

SEQ ID NO: 1970 - RNA, 21 nt, Artificial Sequence
  siRNA sense strand against APCS
  modified_base (1)..(1): 2'-fluorouracil
  modified_base (2)..(2): cm
  modified_base (3)..(3): 2'-fluorocytosine
  modified_base (4)..(4): um
  modified_base (5)..(5): 2'-fluoroadenine
  modified_base (6)..(6): um
  modified_base (7)..(7): 2'-fluorocytosine
  modified_base (8)..(8): um
  modified_base (9)..(9): 2'-fluoroguanine
  modified_base (10)..(10): um
  modified_base (11)..(11): 2'-fluoroadenine
  modified_base (12)..(12): 2'-fluorouracil
  modified_base (13)..(13): gm
  modified_base (14)..(14): 2'-fluorouracil
  modified_base (15)..(15): cm
  modified_base (16)..(16): 2'-fluorouracil
  modified_base (17)..(17): gm
  modified_base (18)..(18): 2'-fluorocytosine
  modified_base (19)..(19): cm
  modified_base (20)..(20): 2'-fluorouracil
  modified_base (21)..(21): 2'-O-methyladenosine
uccuaucuguaugucugccua

SEQ ID NO: 1971 - RNA, 21 nt, Artificial Sequence
  siRNA sense strand against APCS
  modified_base (1)..(1): 2'-fluoroadenine
  modified_base (2)..(2): um
  modified_base (3)..(3): 2'-fluorocytosine
  modified_base (4)..(4): um
  modified_base (5)..(5): 2'-fluoroguanine
  modified_base (6)..(6): um
  modified_base (7)..(7): 2'-fluoroadenine
  modified_base (8)..(8): um
  modified_base (9)..(9): 2'-fluoroguanine
  modified_base (10)..(10): um
  modified_base (11)..(11): 2'-fluorocytosine
  modified_base (12)..(12): 2'-fluorouracil
  modified_base (13)..(13): gm
  modified_base (14)..(14): 2'-fluorocytosine
  modified_base (15)..(15): cm
  modified_base (16)..(16): 2'-fluorouracil
  modified_base (17)..(17): 2'-O-methyladenosine
  modified_base (18)..(18): 2'-fluoroadenine
  modified_base (19)..(19): um
  modified_base (20)..(20): 2'-fluorouracil
  modified_base (21)..(21): 2'-O-methyladenosine
aucuguaugucugccuaauua

SEQ ID NO: 1972 - RNA, 21 nt, Artificial Sequence
  siRNA sense strand against APCS
  modified_base (1)..(1): 2'-fluorouracil
  modified_base (2)..(2): cm
  modified_base (3)..(3): 2'-fluorouracil
  modified_base (4)..(4): gm
  modified_base (5)..(5): 2'-fluorouracil
  modified_base (6)..(6): 2'-O-methyladenosine
  modified_base (7)..(7): 2'-fluorouracil
  modified_base (8)..(8): gm
  modified_base (9)..(9): 2'-fluorouracil
  modified_base (10)..(10): cm
  modified_base (11)..(11): 2'-fluorouracil
  modified_base (12)..(12): 2'-fluoroguanine
  modified_base (13)..(13): cm
  modified_base (14)..(14): 2'-fluorocytosine
  modified_base (15)..(15): um
  modified_base (16)..(16): 2'-fluoroadenine
  modified_base (17)..(17): 2'-O-methyladenosine
  modified_base (18)..(18): 2'-fluorouracil
  modified_base (19)..(19): um
  modified_base (20)..(20): 2'-fluoroadenine
  modified_base (21)..(21): 2'-O-methyladenosine
ucuguaugucugccuaauuaa

SEQ ID NO: 1973 - RNA, 21 nt, Artificial Sequence
  siRNA sense strand against APCS
  modified_base (1)..(1): 2'-fluorocytosine
  modified_base (2)..(2): um
  modified_base (3)..(3): 2'-fluoroguanine
  modified_base (4)..(4): um
  modified_base (5)..(5): 2'-fluoroadenine
  modified_base (6)..(6): um
  modified_base (7)..(7): 2'-fluoroguanine
  modified_base (8)..(8): um
  modified_base (9)..(9): 2'-fluorocytosine
  modified_base (10)..(10): um
  modified_base (11)..(11): 2'-fluoroguanine
  modified_base (12)..(12): 2'-fluorocytosine
  modified_base (13)..(13): cm
  modified_base (14)..(14): 2'-fluorouracil
  modified_base (15)..(15): 2'-O-methyladenosine
  modified_base (16)..(16): 2'-fluoroadenine
  modified_base (17)..(17): um
  modified_base (18)..(18): 2'-fluorouracil
  modified_base (19)..(19): 2'-O-methyladenosine
  modified_base (20)..(20): 2'-fluoroadenine
  modified_base (21)..(21): 2'-O-methyladenosine
cuguaugucugccuaauuaaa

SEQ ID NO: 1974 - RNA, 21 nt, Artificial Sequence
  siRNA sense strand against APCS
  modified_base (1)..(1): 2'-fluoroguanine
  modified_base (2)..(2): um
  modified_base (3)..(3): 2'-fluorocytosine
  modified_base (4)..(4): um
  modified_base (5)..(5): 2'-fluoroguanine
  modified_base (6)..(6): cm
  modified_base (7)..(7): 2'-fluorocytosine
  modified_base (8)..(8): um
  modified_base (9)..(9): 2'-fluoroadenine
  modified_base (10)..(10): 2'-O-methyladenosine
  modified_base (11)..(12): 2'-fluorouracil
  modified_base (13)..(13): 2'-O-methyladenosine
  modified_base (14)..(14): 2'-fluoroadenine
  modified_base (15)..(15): 2'-O-methyladenosine
  modified_base (16)..(16): 2'-fluoroadenine
  modified_base (17)..(17): 2'-O-methyladenosine
  modified_base (18)..(18): 2'-fluoroadenine
  modified_base (19)..(19): 2'-O-methyladenosine
  modified_base (20)..(20): 2'-fluorouracil
  modified_base (21)..(21): 2'-O-methyladenosine
gucugccuaauuaaaaaaaua

SEQ ID NO: 1975 - RNA, 23 nt, Artificial Sequence
  siRNA antisense strand against APCS
  modified_base (1)..(1): 2'-fluorouracil
  modified_base (2)..(2): 2'-O-methyladenosine
  modified_base (3)..(3): 2'-fluoroguanine
  modified_base (4)..(4): gm
  modified_base (5)..(5): 2'-fluorocytosine
  modified_base (6)..(6): um
  modified_base (7)..(7): 2'-fluorocytosine
  modified_base (8)..(8): gm
  modified_base (9)..(9): 2'-fluoroadenine
  modified_base (10)..(11): 2'-O-methyladenosine
  modified_base (12)..(12): 2'-fluoroadenine
  modified_base (13)..(13): cm
  modified_base (14)..(14): 2'-fluoroadenine
  modified_base (15)..(15): cm
  modified_base (16)..(16): 2'-fluoroadenine
  modified_base (17)..(17): 2'-O-methyladenosine
  modified_base (18)..(18): 2'-fluoroguanine
  modified_base (19)..(19): gm
  modified_base (20)..(20): 2'-fluorouracil
  modified_base (21)..(21): 2'-O-methyladenosine
  modified_base (22)..(22): 2'-fluoroadenine
  modified_base (23)..(23): 2'-O-methyladenosine
uaggcucgaaaacacaagguaaa

SEQ ID NO: 1976 - RNA, 23 nt, Artificial Sequence
  siRNA antisense strand against APCS
  modified_base (1)..(1): 2'-fluorouracil
  modified_base (2)..(2): 2'-O-methyladenosine
  modified_base (3)..(3): 2'-fluoroguanine
  modified_base (4)..(4): gm
  modified_base (5)..(5): 2'-fluoroadenine
  modified_base (6)..(6): gm
  modified_base (7)..(7): 2'-fluoroadenine
  modified_base (8)..(8): 2'-O-methyladenosine
  modified_base (9)..(9): 2'-fluoroguanine
  modified_base (10)..(10): 2'-O-methyladenosine
  modified_base (11)..(11): gm
  modified_base (12)..(12): 2'-fluoroguanine
  modified_base (13)..(13): cm
  modified_base (14)..(14): 2'-fluorouracil
  modified_base (15)..(15): gm
  modified_base (16)..(16): 2'-fluorouracil
  modified_base (17)..(17): 2'-O-methyladenosine
  modified_base (18)..(18): 2'-fluoroguanine
  modified_base (19)..(19): gm
  modified_base (20)..(20): 2'-fluorocytosine
  modified_base (21)..(21): 2'-O-methyladenosine
  modified_base (22)..(22): 2'-fluorocytosine
  modified_base (23)..(23): gm
uaggagaagaggcuguaggcacg

SEQ ID NO: 1977 - RNA, 23 nt, Artificial Sequence
  siRNA antisense strand against APCS
  modified_base (1)..(1): 2'-fluorouracil
  modified_base (2)..(2): 2'-O-methyladenosine
  modified_base (3)..(3): 2'-fluorouracil
  modified_base (4)..(4): um
  modified_base (5)..(5): 2'-fluoroguanine
  modified_base (6)..(6): um
  modified_base (7)..(7): 2'-fluoroadenine
  modified_base (8)..(8): gm
  modified_base (9)..(9): 2'-fluoroguanine
  modified_base (10)..(10): 2'-O-methyladenosine
  modified_base (11)..(11): gm
  modified_base (12)..(12): 2'-fluoroadenine
  modified_base (13)..(13): 2'-O-methyladenosine
  modified_base (14)..(14): 2'-fluoroguanine
  modified_base (15)..(15): 2'-O-methyladenosine
  modified_base (16)..(16): 2'-fluoroguanine
  modified_base (17)..(17): gm
  modified_base (18)..(18): 2'-fluorocytosine
  modified_base (19)..(19): um
  modified_base (20)..(20): 2'-fluoroguanine
  modified_base (21)..(21): um
  modified_base (22)..(22): 2'-fluoroadenine
  modified_base (23)..(23): gm
uauuguaggagaagaggcuguag

SEQ ID NO: 1978 - RNA, 23 nt, Artificial Sequence
  siRNA antisense strand against APCS
  modified_base (1)..(1): 2'-fluorouracil
  modified_base (2)..(2): cm
  modified_base (3)..(3): 2'-fluoroadenine
  modified_base (4)..(4): gm
  modified_base (5)..(5): 2'-fluorocytosine
  modified_base (6)..(6): 2'-O-methyladenosine
  modified_base (7)..(7): 2'-fluoroadenine
  modified_base (8)..(8): um
  modified_base (9)..(9): 2'-fluoroadenine
  modified_base (10)..(11): cm
  modified_base (12)..(12): 2'-fluorouracil
  modified_base (13)..(13): gm
  modified_base (14)..(14): 2'-fluoroadenine
  modified_base (15)..(15): um
  modified_base (16)..(16): 2'-fluoroguanine
  modified_base (17)..(17): 2'-O-methyladenosine
  modified_base (18)..(18): 2'-fluoroguanine
  modified_base (19)..(19): gm
  modified_base (20)..(20): 2'-fluoroadenine
  modified_base (21)..(21): cm
  modified_base (22)..(22): 2'-fluorouracil
  modified_base (23)..(23): cm
ucagcaauaccugaugaggacuc

SEQ ID NO: 1979 - RNA, 23 nt, Artificial Sequence
  siRNA antisense strand against APCS
  modified_base (1)..(1): 2'-fluorouracil
  modified_base (2)..(2): cm
  modified_base (3)..(3): 2'-fluorocytosine
  modified_base (4)..(4): cm
  modified_base (5)..(5): 2'-fluoroadenine
  modified_base (6)..(6): cm
  modified_base (7)..(7): 2'-fluoroadenine
  modified_base (8)..(8): 2'-O-methyladenosine
  modified_base (9)..(9): 2'-fluoroadenine
  modified_base (10)..(11): gm
  modified_base (12)..(12): 2'-fluoroadenine
  modified_base (13)..(13): cm
  modified_base (14)..(14): 2'-fluorouracil
  modified_base (15)..(15): gm
  modified_base (16)..(16): 2'-fluoroguanine
  modified_base (17)..(17): cm
  modified_base (18)..(18): 2'-fluorouracil
  modified_base (19)..(19): cm
  modified_base (20)..(20): 2'-fluorocytosine
  modified_base (21)..(21): um
  modified_base (22)..(22): 2'-fluoroadenine
  modified_base (23)..(23): um
ucccacaaaggacuggcuccuau

SEQ ID NO: 1980 - RNA, 23 nt, Artificial Sequence
  siRNA antisense strand against APCS
  modified_base (1)..(1): 2'-fluorouracil
  modified_base (2)..(2): cm
  modified_base (3)..(3): 2'-fluorouracil
  modified_base (4)..(4): cm
  modified_base (5)..(5): 2'-fluorocytosine
  modified_base (6)..(6): cm
  modified_base (7)..(7): 2'-fluoroadenine
  modified_base (8)..(8): cm
  modified_base (9)..(9): 2'-fluoroadenine
  modified_base (10)..(11): 2'-O-methyladenosine
  modified_base (12)..(12): 2'-fluoroguanine
  modified_base (13)..(13): gm
  modified_base (14)..(14): 2'-fluoroadenine
  modified_base (15)..(15): cm
  modified_base (16)..(16): 2'-fluorouracil
  modified_base (17)..(17): gm
  modified_base (18)..(18): 2'-fluoroguanine
  modified_base (19)..(19): cm
  modified_base (20)..(20): 2'-fluorouracil
  modified_base (21)..(21): cm
  modified_base (22)..(22): 2'-fluorocytosine
  modified_base (23)..(23): um
ucucccacaaaggacuggcuccu

SEQ ID NO: 1981 - RNA, 23 nt, Artificial Sequence
  siRNA antisense strand against APCS
  modified_base (1)..(1): 2'-fluoroadenine
  modified_base (2)..(2): um
  modified_base (3)..(3): 2'-fluorocytosine
  modified_base (4)..(4): um
  modified_base (5)..(5): 2'-fluorocytosine
  modified_base (6)..(6): um
  modified_base (7)..(7): 2'-fluorocytosine
  modified_base (8)..(8): cm
  modified_base (9)..(9): 2'-fluorocytosine
  modified_base (10)..(10): 2'-O-methyladenosine
  modified_base (11)..(11): cm
  modified_base (12)..(12): 2'-fluoroadenine
  modified_base (13)..(13): 2'-O-methyladenosine
  modified_base (14)..(14): 2'-fluoroadenine
  modified_base (15)..(15): gm
  modified_base (16)..(16): 2'-fluoroguanine
  modified_base (17)..(17): 2'-O-methyladenosine
  modified_base (18)..(18): 2'-fluorocytosine
  modified_base (19)..(19): um
  modified_base (20)..(20): 2'-fluoroguanine
  modified_base (21)..(21): gm
  modified_base (22)..(22): 2'-fluorocytosine
  modified_base (23)..(23): um
aucucucccacaaaggacuggcu

SEQ ID NO: 1982 - RNA, 23 nt, Artificial Sequence
  siRNA antisense strand against APCS
  modified_base (1)..(1): 2'-fluoroadenine
  modified_base (2)..(2): 2'-O-methyladenosine
  modified_base (3)..(3): 2'-fluorouracil
  modified_base (4)..(4): cm
  modified_base (5)..(5): 2'-fluorouracil
  modified_base (6)..(6): cm
  modified_base (7)..(7): 2'-fluorouracil
  modified_base (8)..(8): cm
  modified_base (9)..(9): 2'-fluorocytosine
  modified_base (10)..(10): cm
  modified_base (11)..(11): 2'-O-methyladenosine
  modified_base (12)..(12): 2'-fluorocytosine
  modified_base (13)..(13): 2'-O-methyladenosine
  modified_base (14)..(14): 2'-fluoroadenine
  modified_base (15)..(15): 2'-O-methyladenosine
  modified_base (16)..(16): 2'-fluoroguanine
  modified_base (17)..(17): gm
  modified_base (18)..(18): 2'-fluoroadenine
  modified_base (19)..(19): cm
  modified_base (20)..(20): 2'-fluorouracil
  modified_base (21)..(21): gm
  modified_base (22)..(22): 2'-fluoroguanine
  modified_base (23)..(23): cm
aaucucucccacaaaggacuggc

SEQ ID NO: 1983 - RNA, 23 nt, Artificial Sequence
  siRNA antisense strand against APCS
  modified_base (1)..(1): 2'-fluoroadenine
  modified_base (2)..(2): cm
  modified_base (3)..(3): 2'-fluoroadenine
  modified_base (4)..(4): 2'-O-methyladenosine
  modified_base (5)..(5): 2'-fluoroadenine
  modified_base (6)..(6): um
  modified_base (7)..(7): 2'-fluorocytosine
  modified_base (8)..(8): cm
  modified_base (9)..(9): 2'-fluorocytosine
  modified_base (10)..(10): cm
  modified_base (11)..(11): 2'-O-methyladenosine
  modified_base (12)..(12): 2'-fluoroadenine
  modified_base (13)..(13): um
  modified_base (14)..(14): 2'-fluorocytosine
  modified_base (15)..(15): um
  modified_base (16)..(16): 2'-fluorocytosine
  modified_base (17)..(17): um
  modified_base (18)..(18): 2'-fluorocytosine
  modified_base (19)..(19): cm
  modified_base (20)..(20): 2'-fluorocytosine
  modified_base (21)..(21): 2'-O-methyladenosine
  modified_base (22)..(22): 2'-fluorocytosine
  modified_base (23)..(23): 2'-O-methyladenosine
acaaauccccaaucucucccaca

SEQ ID NO: 1984 - RNA, 23 nt, Artificial Sequence
  siRNA antisense strand against APCS
  modified_base (1)..(1): 2'-fluorouracil
  modified_base (2)..(2): 2'-O-methyladenosine
  modified_base (3)..(3): 2'-fluorocytosine
  modified_base (4)..(4): 2'-O-methyladenosine
  modified_base (5)..(5): 2'-fluoroadenine
  modified_base (6)..(6): 2'-O-methyladenosine
  modified_base (7)..(7): 2'-fluorouracil
  modified_base (8)..(8): cm
  modified_base (9)..(9): 2'-fluorocytosine
  modified_base (10)..(11): cm
  modified_base (12)..(12): 2'-fluoroadenine
  modified_base (13)..(13): 2'-O-methyladenosine
  modified_base (14)..(14): 2'-fluorouracil
  modified_base (15)..(15): cm
  modified_base (16)..(16): 2'-fluorouracil
  modified_base (17)..(17): cm
  modified_base (18)..(18): 2'-fluorouracil
  modified_base (19)..(19): cm
  modified_base (20)..(20): 2'-fluorocytosine
  modified_base (21)..(21): cm
  modified_base (22)..(22): 2'-fluoroadenine
  modified_base (23)..(23): cm
uacaaauccccaaucucucccac

SEQ ID NO: 1985 - RNA, 23 nt, Artificial Sequence
  siRNA antisense strand against APCS
  modified_base (1)..(1): 2'-fluorouracil
  modified_base (2)..(2): gm
  modified_base (3)..(3): 2'-fluorouracil
  modified_base (4)..(4): 2'-O-methyladenosine
  modified_base (5)..(5): 2'-fluorocytosine
  modified_base (6)..(6): 2'-O-methyladenosine
  modified_base (7)..(7): 2'-fluoroadenine
  modified_base (8)..(8): 2'-O-methyladenosine
  modified_base (9)..(9): 2'-fluorouracil
  modified_base (10)..(11): cm
  modified_base (12)..(12): 2'-fluorocytosine
  modified_base (13)..(13): cm
  modified_base (14)..(14): 2'-fluoroadenine
  modified_base (15)..(15): 2'-O-methyladenosine
  modified_base (16)..(16): 2'-fluorouracil
  modified_base (17)..(17): cm
  modified_base (18)..(18): 2'-fluorouracil
  modified_base (19)..(19): cm
  modified_base (20)..(20): 2'-fluorouracil
  modified_base (21)..(21): cm
  modified_base (22)..(22): 2'-fluorocytosine
  modified_base (23)..(23): cm
uguacaaauccccaaucucuccc

SEQ ID NO: 1986 - RNA, 23 nt, Artificial Sequence
  siRNA antisense strand against APCS
  modified_base (1)..(1): 2'-fluorouracil
  modified_base (2)..(2): 2'-O-methyladenosine
  modified_base (3)..(3): 2'-fluorocytosine
  modified_base (4)..(4): cm
  modified_base (5)..(5): 2'-fluorocytosine
  modified_base (6)..(6): um
  modified_base (7)..(7): 2'-fluoroguanine
  modified_base (8)..(8): 2'-O-methyladenosine
  modified_base (9)..(9): 2'-fluorouracil
  modified_base (10)..(10): 2'-O-methyladenosine
  modified_base (11)..(11): gm
  modified_base (12)..(12): 2'-fluoroguanine
  modified_base (13)..(13): cm
  modified_base (14)..(14): 2'-fluoroadenine
  modified_base (15)..(15): gm
  modified_base (16)..(16): 2'-fluoroadenine
  modified_base (17)..(17): cm
  modified_base (18)..(18): 2'-fluoroadenine
  modified_base (19)..(19): gm
  modified_base (20)..(20): 2'-fluoroguanine
  modified_base (21)..(21): 2'-O-methyladenosine
  modified_base (22)..(22): 2'-fluorouracil
  modified_base (23)..(23): 2'-O-methyladenosine
uacccugauaggcagacaggaua

SEQ ID NO: 1987 - RNA, 23 nt, Artificial Sequence
  siRNA antisense strand against APCS
  modified_base (1)..(1): 2'-fluoroguanine
  modified_base (2)..(2): 2'-O-methyladenosine
  modified_base (3)..(3): 2'-fluorouracil
  modified_base (4)..(4): um
  modified_base (5)..(5): 2'-fluorouracil
  modified_base (6)..(6): cm
  modified_base (7)..(7): 2'-fluoroadenine
  modified_base (8)..(8): um
  modified_base (9)..(9): 2'-fluoroadenine
  modified_base (10)..(10): gm
  modified_base (11)..(11): um
  modified_base (12)..(12): 2'-fluorouracil
  modified_base (13)..(13): cm
  modified_base (14)..(14): 2'-fluoroadenine
  modified_base (15)..(15): gm
  modified_base (16)..(16): 2'-fluoroadenine
  modified_base (17)..(17): gm
  modified_base (18)..(18): 2'-fluorocytosine
  modified_base (19)..(19): cm
  modified_base (20)..(20): 2'-fluorouracil
  modified_base (21)..(21): gm
  modified_base (22)..(22): 2'-fluorocytosine
  modified_base (23)..(23): cm
gauuucauaguucagagccugcc

SEQ ID NO: 1988 - RNA, 23 nt, Artificial Sequence
  siRNA antisense strand against APCS
  modified_base (1)..(1): 2'-fluoroguanine
  modified_base (2)..(2): um
  modified_base (3)..(3): 2'-fluorouracil
  modified_base (4)..(4): um
  modified_base (5)..(5): 2'-fluoroguanine
  modified_base (6)..(6): 2'-O-methyladenosine
  modified_base (7)..(7): 2'-fluorouracil
  modified_base (8)..(8): gm
  modified_base (9)..(9): 2'-fluoroadenine
  modified_base (10)..(10): um
  modified_base (11)..(11): gm
  modified_base (12)..(12): 2'-fluoroadenine
  modified_base (13)..(13): cm
  modified_base (14)..(14): 2'-fluoroadenine
  modified_base (15)..(15): um
  modified_base (16)..(16): 2'-fluoroadenine
  modified_base (17)..(17): um
  modified_base (18)..(18): 2'-fluorocytosine
  modified_base (19)..(19): cm
  modified_base (20)..(20): 2'-fluorouracil
  modified_base (21)..(21): cm
  modified_base (22)..(22): 2'-fluorouracil
  modified_base (23)..(23): gm
guuugaugaugacauauccucug

SEQ ID NO: 1989 - RNA, 23 nt, Artificial Sequence
  siRNA antisense strand against APCS
  modified_base (1)..(1): 2'-fluorouracil
  modified_base (2)..(2): gm
  modified_base (3)..(3): 2'-fluoroadenine
  modified_base (4)..(4): gm
  modified_base (5)..(5): 2'-fluorouracil
  modified_base (6)..(6): cm
  modified_base (7)..(7): 2'-fluoroadenine
  modified_base (8)..(8): 2'-O-methyladenosine
  modified_base (9)..(9): 2'-fluoroguanine
  modified_base (10)..(10): 2'-O-methyladenosine
  modified_base (11)..(11): cm
  modified_base (12)..(12): 2'-fluorocytosine
  modified_base (13)..(13): um
  modified_base (14)..(14): 2'-fluorocytosine
  modified_base (15)..(15): 2'-O-methyladenosine
  modified_base (16)..(16): 2'-fluoroguanine
  modified_base (17)..(17): 2'-O-methyladenosine
  modified_base (18)..(18): 2'-fluorocytosine
  modified_base (19)..(19): cm
  modified_base (20)..(20): 2'-fluorocytosine
  modified_base (21)..(21): 2'-O-methyladenosine
  modified_base (22)..(22): 2'-fluorocytosine
  modified_base (23)..(23): 2'-O-methyladenosine
ugagucaagaccucagacccaca

SEQ ID NO: 1990 - RNA, 23 nt, Artificial Sequence
  siRNA antisense strand against APCS
  modified_base (1)..(1): 2'-fluorouracil
  modified_base (2)..(2): um
  modified_base (3)..(3): 2'-fluorouracil
  modified_base (4)..(4): cm
  modified_base (5)..(5): 2'-fluoroadenine
  modified_base (6)..(6): 2'-O-methyladenosine
  modified_base (7)..(7): 2'-fluoroguanine
  modified_base (8)..(8): um
  modified_base (9)..(9): 2'-fluoroguanine
  modified_base (10)..(10): cm
  modified_base (11)..(11): um
  modified_base (12)..(12): 2'-fluorocytosine
  modified_base (13)..(13): um
  modified_base (14)..(14): 2'-fluorocytosine
  modified_base (15)..(15): gm
  modified_base (16)..(16): 2'-fluorouracil
  modified_base (17)..(17): um
  modified_base (18)..(18): 2'-fluoroguanine
  modified_base (19)..(19): 2'-O-methyladenosine
  modified_base (20)..(20): 2'-fluoroguanine
  modified_base (21)..(21): um
  modified_base (22)..(22): 2'-fluorocytosine
  modified_base (23)..(23): 2'-O-methyladenosine
uuucaagugcucucguugaguca

SEQ ID NO: 1991 - RNA, 23 nt, Artificial Sequence
  siRNA antisense strand against APCS
  modified_base (1)..(1): 2'-fluorouracil
  modified_base (2)..(2): um
  modified_base (3)..(3): 2'-fluorouracil
  modified_base (4)..(4): um
  modified_base (5)..(5): 2'-fluorocytosine
  modified_base (6)..(6): 2'-O-methyladenosine
  modified_base (7)..(7): 2'-fluoroadenine
  modified_base (8)..(8): gm
  modified_base (9)..(9): 2'-fluorouracil
  modified_base (10)..(10): gm
  modified_base (11)..(11): cm
  modified_base (12)..(12): 2'-fluorouracil
  modified_base (13)..(13): cm
  modified_base (14)..(14): 2'-fluorouracil
  modified_base (15)..(15): cm
  modified_base (16)..(16): 2'-fluoroguanine
  modified_base (17)..(17): um
  modified_base (18)..(18): 2'-fluorouracil
  modified_base (19)..(19): gm
  modified_base (20)..(20): 2'-fluoroadenine
  modified_base (21)..(21): gm
  modified_base (22)..(22): 2'-fluorouracil
  modified_base (23)..(23): cm
uuuucaagugcucucguugaguc

SEQ ID NO: 1992 - RNA, 23 nt, Artificial Sequence
  siRNA antisense strand against APCS
  modified_base (1)..(1): 2'-fluoroadenine
  modified_base (2)..(2): um
  modified_base (3)..(3): 2'-fluorouracil
  modified_base (4)..(4): um
  modified_base (5)..(5): 2'-fluorouracil
  modified_base (6)..(6): cm
  modified_base (7)..(7): 2'-fluoroadenine
  modified_base (8)..(8): 2'-O-methyladenosine
  modified_base (9)..(9): 2'-fluoroguanine
  modified_base (10)..(10): um
  modified_base (11)..(11): gm
  modified_base (12)..(12): 2'-fluorocytosine
  modified_base (13)..(13): um
  modified_base (14)..(14): 2'-fluorocytosine
  modified_base (15)..(15): um
  modified_base (16)..(16): 2'-fluorocytosine
  modified_base (17)..(17): gm
  modified_base (18)..(18): 2'-fluorouracil
  modified_base (19)..(19): um
  modified_base (20)..(20): 2'-fluoroguanine
  modified_base (21)..(21): 2'-O-methyladenosine
  modified_base (22)..(22): 2'-fluoroguanine
  modified_base (23)..(23): um
auuuucaagugcucucguugagu

SEQ ID NO: 1993 - RNA, 23 nt, Artificial Sequence
  siRNA antisense strand against APCS
  modified_base (1)..(1): 2'-fluorouracil
  modified_base (2)..(2): cm
  modified_base (3)..(3): 2'-fluoroadenine
  modified_base (4)..(4): um
  modified_base (5)..(5): 2'-fluorouracil
  modified_base (6)..(6): um
  modified_base (7)..(7): 2'-fluorouracil
  modified_base (8)..(8): cm
  modified_base (9)..(9): 2'-fluoroadenine
  modified_base (10)..(10): 2'-O-methyladenosine
  modified_base (11)..(11): gm
  modified_base (12)..(12): 2'-fluorouracil
  modified_base (13)..(13): gm
  modified_base (14)..(14): 2'-fluorocytosine
  modified_base (15)..(15): um
  modified_base (16)..(16): 2'-fluorocytosine
  modified_base (17)..(17): um
  modified_base (18)..(18): 2'-fluorocytosine
  modified_base (19)..(19): gm
  modified_base (20)..(20): 2'-fluorouracil
  modified_base (21)..(21): um
  modified_base (22)..(22): 2'-fluoroguanine
  modified_base (23)..(23): 2'-O-methyladenosine
ucauuuucaagugcucucguuga

SEQ ID NO: 1994 - RNA, 23 nt, Artificial Sequence
  siRNA antisense strand against APCS
  modified_base (1)..(1): 2'-fluorouracil
  modified_base (2)..(2): um
  modified_base (3)..(3): 2'-fluorocytosine
  modified_base (4)..(4): 2'-O-methyladenosine
  modified_base (5)..(5): 2'-fluorouracil
  modified_base (6)..(6): um
  modified_base (7)..(7): 2'-fluorouracil
  modified_base (8)..(8): um
  modified_base (9)..(9): 2'-fluorocytosine
  modified_base (10)..(11): 2'-O-methyladenosine
  modified_base (12)..(12): 2'-fluoroguanine
  modified_base (13)..(13): um
  modified_base (14)..(14): 2'-fluoroguanine
  modified_base (15)..(15): cm
  modified_base (16)..(16): 2'-fluorouracil
  modified_base (17)..(17): cm
  modified_base (18)..(18): 2'-fluorouracil
  modified_base (19)..(19): cm
  modified_base (20)..(20): 2'-fluoroguanine
  modified_base (21)..(21): um
  modified_base (22)..(22): 2'-fluorouracil
  modified_base (23)..(23): gm
uucauuuucaagugcucucguug

SEQ ID NO: 1995 - RNA, 23 nt, Artificial Sequence
  siRNA antisense strand against APCS
  modified_base (1)..(1): 2'-fluorouracil
  modified_base (2)..(2): um
  modified_base (3)..(3): 2'-fluorouracil
  modified_base (4)..(4): cm
  modified_base (5)..(5): 2'-fluoroadenine
  modified_base (6)..(6): um
  modified_base (7)..(7): 2'-fluorouracil
  modified_base (8)..(8): um
  modified_base (9)..(9): 2'-fluorouracil
  modified_base (10)..(10): cm
  modified_base (11)..(11): 2'-O-methyladenosine
  modified_base (12)..(12): 2'-fluoroadenine
  modified_base (13)..(13): gm
  modified_base (14)..(14): 2'-fluorouracil
  modified_base (15)..(15): gm
  modified_base (16)..(16): 2'-fluorocytosine
  modified_base (17)..(17): um
  modified_base (18)..(18): 2'-fluorocytosine
  modified_base (19)..(19): um
  modified_base (20)..(20): 2'-fluorocytosine
  modified_base (21)..(21): gm
  modified_base (22)..(22): 2'-fluorouracil
  modified_base (23)..(23): um
uuucauuuucaagugcucucguu

SEQ ID NO: 1996 - RNA, 23 nt, Artificial Sequence
  siRNA antisense strand against APCS
  modified_base (1)..(1): 2'-fluoroadenine
  modified_base (2)..(2): um
  modified_base (3)..(3): 2'-fluorouracil
  modified_base (4)..(4): um
  modified_base (5)..(5): 2'-fluorocytosine
  modified_base (6)..(6): 2'-O-methyladenosine
  modified_base (7)..(7): 2'-fluorouracil
  modified_base (8)..(8): um
  modified_base (9)..(9): 2'-fluorouracil
  modified_base (10)..(10): um
  modified_base (11)..(11): cm
  modified_base (12)..(12): 2'-fluoroadenine
  modified_base (13)..(13): 2'-O-methyladenosine
  modified_base (14)..(14): 2'-fluoroguanine
  modified_base (15)..(15): um
  modified_base (16)..(16): 2'-fluoroguanine
  modified_base (17)..(17): cm
  modified_base (18)..(18): 2'-fluorouracil
  modified_base (19)..(19): cm
  modified_base (20)..(20): 2'-fluorouracil
  modified_base (21)..(21): cm
  modified_base (22)..(22): 2'-fluoroguanine
  modified_base (23)..(23): um
auuucauuuucaagugcucucgu

SEQ ID NO: 1997 - RNA, 23 nt, Artificial Sequence
  siRNA antisense strand against APCS
  modified_base (1)..(1): 2'-fluorocytosine
  modified_base (2)..(2): 2'-O-methyladenosine
  modified_base (3)..(3): 2'-fluorouracil
  modified_base (4)..(4): um
  modified_base (5)..(5): 2'-fluorouracil
  modified_base (6)..(6): cm
  modified_base (7)..(7): 2'-fluoroadenine
  modified_base (8)..(8): um
  modified_base (9)..(9): 2'-fluorouracil
  modified_base (10)..(11): um
  modified_base (12)..(12): 2'-fluorocytosine
  modified_base (13)..(13): 2'-O-methyladenosine
  modified_base (14)..(14): 2'-fluoroadenine
  modified_base (15)..(15): gm
  modified_base (16)..(16): 2'-fluorouracil
  modified_base (17)..(17): gm
  modified_base (18)..(18): 2'-fluorocytosine
  modified_base (19)..(19): um
  modified_base (20)..(20): 2'-fluorocytosine
  modified_base (21)..(21): um
  modified_base (22)..(22): 2'-fluorocytosine
  modified_base (23)..(23): gm
cauuucauuuucaagugcucucg

SEQ ID NO: 1998 - RNA, 23 nt, Artificial Sequence
  siRNA antisense strand against APCS
  modified_base (1)..(1): 2'-fluorouracil
  modified_base (2)..(2): gm
  modified_base (3)..(3): 2'-fluorocytosine
  modified_base (4)..(4): um
  modified_base (5)..(5): 2'-fluorouracil
  modified_base (6)..(6): um
  modified_base (7)..(7): 2'-fluoroguanine
  modified_base (8)..(8): 2'-O-methyladenosine
  modified_base (9)..(9): 2'-fluorocytosine
  modified_base (10)..(10): cm
  modified_base (11)..(11): 2'-O-methyladenosine
  modified_base (12)..(12): 2'-fluoroguanine
  modified_base (13)..(13): 2'-O-methyladenosine
  modified_base (14)..(14): 2'-fluorouracil
  modified_base (15)..(15): cm
  modified_base (16)..(16): 2'-fluorouracil
  modified_base (17)..(17): cm
  modified_base (18)..(18): 2'-fluorouracil
  modified_base (19)..(19): um
  modified_base (20)..(20): 2'-fluoroadenine
  modified_base (21)..(21): gm
  modified_base (22)..(22): 2'-fluoroadenine
  modified_base (23)..(23): cm
ugcuuugaccagaucucuuagac

SEQ ID NO: 1999 - RNA, 23 nt, Artificial Sequence
  siRNA antisense strand against APCS
  modified_base (1)..(1): 2'-fluoroguanine
  modified_base (2)..(2): um
  modified_base (3)..(3): 2'-fluoroadenine
  modified_base (4)..(4): um
  modified_base (5)..(5): 2'-fluorocytosine
  modified_base (6)..(6): cm
  modified_base (7)..(7): 2'-fluoroadenine
  modified_base (8)..(8): gm
  modified_base (9)..(9): 2'-fluorouracil
  modified_base (10)..(10): um
  modified_base (11)..(11): gm
  modified_base (12)..(12): 2'-fluorocytosine
  modified_base (13)..(13): um
  modified_base (14)..(14): 2'-fluorouracil
  modified_base (15)..(15): um
  modified_base (16)..(16): 2'-fluoroguanine
  modified_base (17)..(17): 2'-O-methyladenosine
  modified_base (18)..(18): 2'-fluorocytosine
  modified_base (19)..(19): cm
  modified_base (20)..(20): 2'-fluoroadenine
  modified_base (21)..(21): gm
  modified_base (22)..(22): 2'-fluoroadenine
  modified_base (23)..(23): um
guauccaguugcuuugaccagau

SEQ ID NO: 2000 - RNA, 23 nt, Artificial Sequence
  siRNA antisense strand against APCS
  modified_base (1)..(1): 2'-fluoroadenine
  modified_base (2)..(2): gm
  modified_base (3)..(3): 2'-fluoroadenine
  modified_base (4)..(4): um
  modified_base (5)..(5): 2'-fluorocytosine
  modified_base (6)..(6): um
  modified_base (7)..(7): 2'-fluoroadenine
  modified_base (8)..(8): gm
  modified_base (9)..(9): 2'-fluorouracil
  modified_base (10)..(10): 2'-O-methyladenosine
  modified_base (11)..(11): um
  modified_base (12)..(12): 2'-fluorocytosine
  modified_base (13)..(13): cm
  modified_base (14)..(14): 2'-fluoroadenine
  modified_base (15)..(15): gm
  modified_base (16)..(16): 2'-fluorouracil
  modified_base (17)..(17): um
  modified_base (18)..(18): 2'-fluoroguanine
  modified_base (19)..(19): cm
  modified_base (20)..(20): 2'-fluorouracil
  modified_base (21)..(21): um
  modified_base (22)..(22): 2'-fluorouracil
  modified_base (23)..(23): gm
agaucuaguauccaguugcuuug

SEQ ID NO: 2001 - RNA, 23 nt, Artificial Sequence
  siRNA antisense strand against APCS
  modified_base (1)..(1): 2'-fluoroadenine
  modified_base (2)..(2): 2'-O-methyladenosine
  modified_base (3)..(3): 2'-fluoroguanine
  modified_base (4)..(4): 2'-O-methyladenosine
  modified_base (5)..(5): 2'-fluorouracil
  modified_base (6)..(6): cm
  modified_base (7)..(7): 2'-fluorouracil
  modified_base (8)..(8): 2'-O-methyladenosine
  modified_base (9)..(9): 2'-fluoroguanine
  modified_base (10)..(10): um
  modified_base (11)..(11): 2'-O-methyladenosine
  modified_base (12)..(12): 2'-fluorouracil
  modified_base (13)..(13): cm
  modified_base (14)..(14): 2'-fluorocytosine
  modified_base (15)..(15): 2'-O-methyladenosine
  modified_base (16)..(16): 2'-fluoroguanine
  modified_base (17)..(17): um
  modified_base (18)..(18): 2'-fluorouracil
  modified_base (19)..(19): gm
  modified_base (20)..(20): 2'-fluorocytosine
  modified_base (21)..(21): um
  modified_base (22)..(22): 2'-fluorouracil
  modified_base (23)..(23): um
aagaucuaguauccaguugcuuu

SEQ ID NO: 2002 - RNA, 23 nt, Artificial Sequence
  siRNA antisense strand against APCS
  modified_base (1)..(1): 2'-fluorouracil
  modified_base (2)..(2): 2'-O-methyladenosine
  modified_base (3)..(3): 2'-fluoroadenine
  modified_base (4)..(4): gm
  modified_base (5)..(5): 2'-fluoroadenine
  modified_base (6)..(6): um
  modified_base (7)..(7): 2'-fluorocytosine
  modified_base (8)..(8): um
  modified_base (9)..(9): 2'-fluoroadenine
  modified_base (10)..(10): gm
  modified_base (11)..(11): um
  modified_base (12)..(12): 2'-fluoroadenine
  modified_base (13)..(13): um
  modified_base (14)..(14): 2'-fluorocytosine
  modified_base (15)..(15): cm
  modified_base (16)..(16): 2'-fluoroadenine
  modified_base (17)..(17): gm
  modified_base (18)..(18): 2'-fluorouracil
  modified_base (19)..(19): um
  modified_base (20)..(20): 2'-fluoroguanine
  modified_base (21)..(21): cm
  modified_base (22)..(22): 2'-fluorouracil
  modified_base (23)..(23): um
uaagaucuaguauccaguugcuu

SEQ ID NO: 2003 - RNA, 23 nt, Artificial Sequence
  siRNA antisense strand against APCS
  modified_base (1)..(1): 2'-fluoroadenine
  modified_base (2)..(2): 2'-O-methyladenosine
  modified_base (3)..(3): 2'-fluoroadenine
  modified_base (4)..(4): gm
  modified_base (5)..(5): 2'-fluoroadenine
  modified_base (6)..(6): gm
  modified_base (7)..(7): 2'-fluorocytosine
  modified_base (8)..(8): um
  modified_base (9)..(9): 2'-fluoroguanine
  modified_base (10)..(10): cm
  modified_base (11)..(11): 2'-O-methyladenosine
  modified_base (12)..(12): 2'-fluoroguanine
  modified_base (13)..(13): 2'-O-methyladenosine
  modified_base (14)..(14): 2'-fluorouracil
  modified_base (15)..(15): gm
  modified_base (16)..(16): 2'-fluorouracil
  modified_base (17)..(17): 2'-O-methyladenosine
  modified_base (18)..(18): 2'-fluoroadenine
  modified_base (19)..(19): gm
  modified_base (20)..(20): 2'-fluoroadenine
  modified_base (21)..(21): um
  modified_base (22)..(22): 2'-fluorocytosine
  modified_base (23)..(23): um
aaagagcugcagauguaagaucu

SEQ ID NO: 2004 - RNA, 23 nt, Artificial Sequence
  siRNA antisense strand against APCS
  modified_base (1)..(1): 2'-fluoroguanine
  modified_base (2)..(2): 2'-O-methyladenosine
  modified_base (3)..(3): 2'-fluoroadenine
  modified_base (4)..(4): gm
  modified_base (5)..(5): 2'-fluoroadenine
  modified_base (6)..(6): 2'-O-methyladenosine
  modified_base (7)..(7): 2'-fluoroadenine
  modified_base (8)..(8): gm
  modified_base (9)..(9): 2'-fluoroadenine
  modified_base (10)..(10): gm
  modified_base (11)..(11): cm
  modified_base (12)..(12): 2'-fluorouracil
  modified_base (13)..(13): gm
  modified_base (14)..(14): 2'-fluorocytosine
  modified_base (15)..(15): 2'-O-methyladenosine
  modified_base (16)..(16): 2'-fluoroguanine
  modified_base (17)..(17): 2'-O-methyladenosine
  modified_base (18)..(18): 2'-fluorouracil
  modified_base (19)..(19): gm
  modified_base (20)..(20): 2'-fluorouracil
  modified_base (21)..(21): 2'-O-methyladenosine
  modified_base (22)..(22): 2'-fluoroadenine
  modified_base (23)..(23): gm
gaagaaagagcugcagauguaag

SEQ ID NO: 2005 - RNA, 23 nt, Artificial Sequence
  siRNA antisense strand against APCS
  modified_base (1)..(1): 2'-fluoroadenine
  modified_base (2)..(2): gm
  modified_base (3)..(3): 2'-fluoroadenine
  modified_base (4)..(4): 2'-O-methyladenosine
  modified_base (5)..(5): 2'-fluoroguanine
  modified_base (6)..(6): 2'-O-methyladenosine
  modified_base (7)..(7): 2'-fluoroadenine
  modified_base (8)..(8): 2'-O-methyladenosine
  modified_base (9)..(9): 2'-fluoroguanine
  modified_base (10)..(10): 2'-O-methyladenosine
  modified_base (11)..(11): gm
  modified_base (12)..(12): 2'-fluorocytosine
  modified_base (13)..(13): um
  modified_base (14)..(14): 2'-fluoroguanine
  modified_base (15)..(15): cm
  modified_base (16)..(16): 2'-fluoroadenine
  modified_base (17)..(17): gm
  modified_base (18)..(18): 2'-fluoroadenine
  modified_base (19)..(19): um
  modified_base (20)..(20): 2'-fluoroguanine
  modified_base (21)..(21): um
  modified_base (22)..(22): 2'-fluoroadenine
  modified_base (23)..(23): 2'-O-methyladenosine
agaagaaagagcugcagauguaa

SEQ ID NO: 2006 - RNA, 23 nt, Artificial Sequence
  siRNA antisense strand against APCS
  modified_base (1)..(1): 2'-fluoroadenine
  modified_base (2)..(2): 2'-O-methyladenosine
  modified_base (3)..(3): 2'-fluoroguanine
  modified_base (4)..(4): 2'-O-methyladenosine
  modified_base (5)..(5): 2'-fluoroadenine
  modified_base (6)..(6): gm
  modified_base (7)..(7): 2'-fluoroadenine
  modified_base (8)..(8): 2'-O-methyladenosine
  modified_base (9)..(9): 2'-fluoroadenine
  modified_base (10)..(10): gm
  modified_base (11)..(11): 2'-O-methyladenosine
  modified_base (12)..(12): 2'-fluoroguanine
  modified_base (13)..(13): cm
  modified_base (14)..(14): 2'-fluorouracil
  modified_base (15)..(15): gm
  modified_base (16)..(16): 2'-fluorocytosine
  modified_base (17)..(17): 2'-O-methyladenosine
  modified_base (18)..(18): 2'-fluoroguanine
  modified_base (19)..(19): 2'-O-methyladenosine
  modified_base (20)..(20): 2'-fluorouracil
  modified_base (21)..(21): gm
  modified_base (22)..(22): 2'-fluorouracil
  modified_base (23)..(23): 2'-O-methyladenosine
aagaagaaagagcugcagaugua

SEQ ID NO: 2007 - RNA, 23 nt, Artificial Sequence
  siRNA antisense strand against APCS
  modified_base (1)..(1): 2'-fluoroadenine
  modified_base (2)..(2): 2'-O-methyladenosine
  modified_base (3)..(3): 2'-fluoroadenine
  modified_base (4)..(4): gm
  modified_base (5)..(5): 2'-fluoroadenine
  modified_base (6)..(6): 2'-O-methyladenosine
  modified_base (7)..(7): 2'-fluoroguanine
  modified_base (8)..(8): 2'-O-methyladenosine
  modified_base (9)..(9): 2'-fluoroadenine
  modified_base (10)..(10): 2'-O-methyladenosine
  modified_base (11)..(11): gm
  modified_base (12)..(12): 2'-fluoroadenine
  modified_base (13)..(13): gm
  modified_base (14)..(14): 2'-fluorocytosine
  modified_base (15)..(15): um
  modified_base (16)..(16): 2'-fluoroguanine
  modified_base (17)..(17): cm
  modified_base (18)..(18): 2'-fluoroadenine
  modified_base (19)..(19): gm
  modified_base (20)..(20): 2'-fluoroadenine
  modified_base (21)..(21): um
  modified_base (22)..(22): 2'-fluoroguanine
  modified_base (23)..(23): um
aaagaagaaagagcugcagaugu

SEQ ID NO: 2008 - RNA, 23 nt, Artificial Sequence
  siRNA antisense strand against APCS
  modified_base (1)..(1): 2'-fluorocytosine
  modified_base (2)..(2): 2'-O-methyladenosine
  modified_base (3)..(3): 2'-fluoroadenine
  modified_base (4)..(4): 2'-O-methyladenosine
  modified_base (5)..(5): 2'-fluoroguanine
  modified_base (6)..(6): 2'-O-methyladenosine
  modified_base (7)..(7): 2'-fluoroadenine
  modified_base (8)..(8): gm
  modified_base (9)..(9): 2'-fluoroadenine
  modified_base (10)..(11): 2'-O-methyladenosine
  modified_base (12)..(12): 2'-fluoroguanine
  modified_base (13)..(13): 2'-O-methyladenosine
  modified_base (14)..(14): 2'-fluoroguanine
  modified_base (15)..(15): cm
  modified_base (16)..(16): 2'-fluorouracil
  modified_base (17)..(17): gm
  modified_base (18)..(18): 2'-fluorocytosine
  modified_base (19)..(19): 2'-O-methyladenosine
  modified_base (20)..(20): 2'-fluoroguanine
  modified_base (21)..(21): 2'-O-methyladenosine
  modified_base (22)..(22): 2'-fluorouracil
  modified_base (23)..(23): gm
caaagaagaaagagcugcagaug

SEQ ID NO: 2009 - RNA, 23 nt, Artificial Sequence
  siRNA antisense strand against APCS
  modified_base (1)..(1): 2'-fluorouracil
  modified_base (2)..(2): cm
  modified_base (3)..(3): 2'-fluoroadenine
  modified_base (4)..(4): 2'-O-methyladenosine
  modified_base (5)..(5): 2'-fluoroadenine
  modified_base (6)..(6): gm
  modified_base (7)..(7): 2'-fluoroadenine
  modified_base (8)..(8): 2'-O-methyladenosine
  modified_base (9)..(9): 2'-fluoroguanine
  modified_base (10)..(11): 2'-O-methyladenosine
  modified_base (12)..(12): 2'-fluoroadenine
  modified_base (13)..(13): gm
  modified_base (14)..(14): 2'-fluoroadenine
  modified_base (15)..(15): gm
  modified_base (16)..(16): 2'-fluorocytosine
  modified_base (17)..(17): um
  modified_base (18)..(18): 2'-fluoroguanine
  modified_base (19)..(19): cm
  modified_base (20)..(20): 2'-fluoroadenine
  modified_base (21)..(21): gm
  modified_base (22)..(22): 2'-fluoroadenine
  modified_base (23)..(23): um
ucaaagaagaaagagcugcagau

SEQ ID NO: 2010 - RNA, 23 nt, Artificial Sequence
  siRNA antisense strand against APCS
  modified_base (1)..(1): 2'-fluorouracil
  modified_base (2)..(2): um
  modified_base (3)..(3): 2'-fluorocytosine
  modified_base (4)..(4): 2'-O-methyladenosine
  modified_base (5)..(5): 2'-fluoroadenine
  modified_base (6)..(6): 2'-O-methyladenosine
  modified_base (7)..(7): 2'-fluoroguanine
  modified_base (8)..(8): 2'-O-methyladenosine
  modified_base (9)..(9): 2'-fluoroadenine
  modified_base (10)..(10): gm
  modified_base (11)..(11): 2'-O-methyladenosine
  modified_base (12)..(12): 2'-fluoroadenine
  modified_base (13)..(13): 2'-O-methyladenosine
  modified_base (14)..(14): 2'-fluoroguanine
  modified_base (15)..(15): 2'-O-methyladenosine
  modified_base (16)..(16): 2'-fluoroguanine
  modified_base (17)..(17): cm
  modified_base (18)..(18): 2'-fluorouracil
  modified_base (19)..(19): gm
  modified_base (20)..(20): 2'-fluorocytosine
  modified_base (21)..(21): 2'-O-methyladenosine
  modified_base (22)..(22): 2'-fluoroguanine
  modified_base (23)..(23): 2'-O-methyladenosine
uucaaagaagaaagagcugcaga

SEQ ID NO: 2011 - RNA, 23 nt, Artificial Sequence
  siRNA antisense strand against APCS
  modified_base (1)..(1): 2'-fluoroadenine
  modified_base (2)..(2): um
  modified_base (3)..(3): 2'-fluorouracil
  modified_base (4)..(4): cm
  modified_base (5)..(5): 2'-fluoroadenine
  modified_base (6)..(6): 2'-O-methyladenosine
  modified_base (7)..(7): 2'-fluoroadenine
  modified_base (8)..(8): gm
  modified_base (9)..(9): 2'-fluoroadenine
  modified_base (10)..(10): 2'-O-methyladenosine
  modified_base (11)..(11): gm
  modified_base (12)..(12): 2'-fluoroadenine
  modified_base (13)..(13): 2'-O-methyladenosine
  modified_base (14)..(14): 2'-fluoroadenine
  modified_base (15)..(15): gm
  modified_base (16)..(16): 2'-fluoroadenine
  modified_base (17)..(17): gm
  modified_base (18)..(18): 2'-fluorocytosine
  modified_base (19)..(19): um
  modified_base (20)..(20): 2'-fluoroguanine
  modified_base (21)..(21): cm
  modified_base (22)..(22): 2'-fluoroadenine
  modified_base (23)..(23): gm
auucaaagaagaaagagcugcag

SEQ ID NO: 2012 - RNA, 23 nt, Artificial Sequence
  siRNA antisense strand against APCS
  modified_base (1)..(1): 2'-fluoroadenine
  modified_base (2)..(2): 2'-O-methyladenosine
  modified_base (3)..(3): 2'-fluorouracil
  modified_base (4)..(4): um
  modified_base (5)..(5): 2'-fluorocytosine
  modified_base (6)..(6): 2'-O-methyladenosine
  modified_base (7)..(7): 2'-fluoroadenine
  modified_base (8)..(8): 2'-O-methyladenosine
  modified_base (9)..(9): 2'-fluoroguanine
  modified_base (10)..(11): 2'-O-methyladenosine
  modified_base (12)..(12): 2'-fluoroguanine
  modified_base (13)..(13): 2'-O-methyladenosine
  modified_base (14)..(14): 2'-fluoroadenine
  modified_base (15)..(15): 2'-O-methyladenosine
  modified_base (16)..(16): 2'-fluoroguanine
  modified_base (17)..(17): 2'-O-methyladenosine
  modified_base (18)..(18): 2'-fluoroguanine
  modified_base (19)..(19): cm
  modified_base (20)..(20): 2'-fluorouracil
  modified_base (21)..(21): gm
  modified_base (22)..(22): 2'-fluorocytosine
  modified_base (23)..(23): 2'-O-methyladenosine
aauucaaagaagaaagagcugca

SEQ ID NO: 2013 - RNA, 23 nt, Artificial Sequence
  siRNA antisense strand against APCS
  modified_base (1)..(1): 2'-fluoroadenine
  modified_base (2)..(2): cm
  modified_base (3)..(3): 2'-fluoroadenine
  modified_base (4)..(4): um
  modified_base (5)..(5): 2'-fluoroadenine
  modified_base (6)..(6): cm
  modified_base (7)..(7): 2'-fluoroadenine
  modified_base (8)..(8): gm
  modified_base (9)..(9): 2'-fluoroadenine
  modified_base (10)..(10): um
  modified_base (11)..(11): 2'-O-methyladenosine
  modified_base (12)..(12): 2'-fluoroguanine
  modified_base (13)..(13): gm
  modified_base (14)..(14): 2'-fluoroadenine
  modified_base (15)..(15): 2'-O-methyladenosine
  modified_base (16)..(16): 2'-fluoroadenine
  modified_base (17)..(17): um
  modified_base (18)..(18): 2'-fluorouracil
  modified_base (19)..(19): cm
  modified_base (20)..(20): 2'-fluoroadenine
  modified_base (21)..(21): 2'-O-methyladenosine
  modified_base (22)..(22): 2'-fluoroadenine
  modified_base (23)..(23): gm
acauacagauaggaaauucaaag

SEQ ID NO: 2014 - RNA, 23 nt, Artificial Sequence
  siRNA antisense strand against APCS
  modified_base (1)..(1): 2'-fluorouracil
  modified_base (2)..(2): 2'-O-methyladenosine
  modified_base (3)..(3): 2'-fluoroguanine
  modified_base (4)..(4): gm
  modified_base (5)..(5): 2'-fluorocytosine
  modified_base (6)..(6): 2'-O-methyladenosine
  modified_base (7)..(7): 2'-fluoroguanine
  modified_base (8)..(8): 2'-O-methyladenosine
  modified_base (9)..(9): 2'-fluorocytosine
  modified_base (10)..(10): 2'-O-methyladenosine
  modified_base (11)..(11): um
  modified_base (12)..(12): 2'-fluoroadenine
  modified_base (13)..(13): cm
  modified_base (14)..(14): 2'-fluoroadenine
  modified_base (15)..(15): gm
  modified_base (16)..(16): 2'-fluoroadenine
  modified_base (17)..(17): um
  modified_base (18)..(18): 2'-fluoroadenine
  modified_base (19)..(19): gm
  modified_base (20)..(20): 2'-fluoroguanine
  modified_base (21)..(21): 2'-O-methyladenosine
  modified_base (22)..(22): 2'-fluoroadenine
  modified_base (23)..(23): 2'-O-methyladenosine
uaggcagacauacagauaggaaa

SEQ ID NO: 2015 - RNA, 23 nt, Artificial Sequence
  siRNA antisense strand against APCS
  modified_base (1)..(1): 2'-fluorouracil
  modified_base (2)..(2): 2'-O-methyladenosine
  modified_base (3)..(3): 2'-fluoroadenine
  modified_base (4)..(4): um
  modified_base (5)..(5): 2'-fluorouracil
  modified_base (6)..(6): 2'-O-methyladenosine
  modified_base (7)..(7): 2'-fluoroguanine
  modified_base (8)..(8): gm
  modified_base (9)..(9): 2'-fluorocytosine
  modified_base (10)..(10): 2'-O-methyladenosine
  modified_base (11)..(11): gm
  modified_base (12)..(12): 2'-fluoroadenine
  modified_base (13)..(13): cm
  modified_base (14)..(14): 2'-fluoroadenine
  modified_base (15)..(15): um
  modified_base (16)..(16): 2'-fluoroadenine
  modified_base (17)..(17): cm
  modified_base (18)..(18): 2'-fluoroadenine
  modified_base (19)..(19): gm
  modified_base (20)..(20): 2'-fluoroadenine
  modified_base (21)..(21): um
  modified_base (22)..(22): 2'-fluoroadenine
  modified_base (23)..(23): gm
uaauuaggcagacauacagauag

SEQ ID NO: 2016 - RNA, 23 nt, Artificial Sequence
  siRNA antisense strand against APCS
  modified_base (1)..(1): 2'-fluorouracil
  modified_base (2)..(2): um
  modified_base (3)..(3): 2'-fluoroadenine
  modified_base (4)..(4): 2'-O-methyladenosine
  modified_base (5)..(5): 2'-fluorouracil
  modified_base (6)..(6): um
  modified_base (7)..(7): 2'-fluoroadenine
  modified_base (8)..(8): gm
  modified_base (9)..(9): 2'-fluoroguanine
  modified_base (10)..(10): cm
  modified_base (11)..(11): 2'-O-methyladenosine
  modified_base (12)..(12): 2'-fluoroguanine
  modified_base (13)..(13): 2'-O-methyladenosine
  modified_base (14)..(14): 2'-fluorocytosine
  modified_base (15)..(15): 2'-O-methyladenosine
  modified_base (16)..(16): 2'-fluorouracil
  modified_base (17)..(17): 2'-O-methyladenosine
  modified_base (18)..(18): 2'-fluorocytosine
  modified_base (19)..(19): 2'-O-methyladenosine
  modified_base (20)..(20): 2'-fluoroguanine
  modified_base (21)..(21): 2'-O-methyladenosine
  modified_base (22)..(22): 2'-fluorouracil
  modified_base (23)..(23): 2'-O-methyladenosine
uuaauuaggcagacauacagaua

SEQ ID NO: 2017 - RNA, 23 nt, Artificial Sequence
  siRNA antisense strand against APCS
  modified_base (1)..(1): 2'-fluorouracil
  modified_base (2)..(2): um
  modified_base (3)..(3): 2'-fluorouracil
  modified_base (4)..(4): 2'-O-methyladenosine
  modified_base (5)..(5): 2'-fluoroadenine
  modified_base (6)..(6): um
  modified_base (7)..(7): 2'-fluorouracil
  modified_base (8)..(8): 2'-O-methyladenosine
  modified_base (9)..(9): 2'-fluoroguanine
  modified_base (10)..(10): gm
  modified_base (11)..(11): cm
  modified_base (12)..(12): 2'-fluoroadenine
  modified_base (13)..(13): gm
  modified_base (14)..(14): 2'-fluoroadenine
  modified_base (15)..(15): cm
  modified_base (16)..(16): 2'-fluoroadenine
  modified_base (17)..(17): um
  modified_base (18)..(18): 2'-fluoroadenine
  modified_base (19)..(19): cm
  modified_base (20)..(20): 2'-fluoroadenine
  modified_base (21)..(21): gm
  modified_base (22)..(22): 2'-fluoroadenine
  modified_base (23)..(23): um
uuuaauuaggcagacauacagau

SEQ ID NO: 2018 - RNA, 23 nt, Artificial Sequence
  siRNA antisense strand against APCS
  modified_base (1)..(1): 2'-fluorouracil
  modified_base (2)..(2): 2'-O-methyladenosine
  modified_base (3)..(3): 2'-fluorouracil
  modified_base (4)..(4): um
  modified_base (5)..(5): 2'-fluorouracil
  modified_base (6)..(6): um
  modified_base (7)..(7): 2'-fluorouracil
  modified_base (8)..(8): um
  modified_base (9)..(9): 2'-fluorouracil
  modified_base (10)..(11): 2'-O-methyladenosine
  modified_base (12)..(12): 2'-fluorouracil
  modified_base (13)..(13): um
  modified_base (14)..(14): 2'-fluoroadenine
  modified_base (15)..(15): gm
  modified_base (16)..(16): 2'-fluoroguanine
  modified_base (17)..(17): cm
  modified_base (18)..(18): 2'-fluoroadenine
  modified_base (19)..(19): gm
  modified_base (20)..(20): 2'-fluoroadenine
  modified_base (21)..(21): cm
  modified_base (22)..(22): 2'-fluoroadenine
  modified_base (23)..(23): um
uauuuuuuuaauuaggcagacau

SEQ ID NO: 2019 - RNA, 21 nt, Artificial Sequence
  siRNA sense strand against APCS
  modified_base (1)..(1): 2'-fluorouracil
  modified_base (2)..(2): 2'-O-methyladenosine
  modified_base (3)..(3): 2'-fluorocytosine
  modified_base (4)..(4): cm
  modified_base (5)..(5): 2'-fluorouracil
  modified_base (6)..(6): um
  modified_base (7)..(7): 2'-fluoroguanine
  modified_base (8)..(8): um
  modified_base (9)..(9): 2'-fluoroguanine
  modified_base (10)..(10): um
  modified_base (11)..(12): 2'-fluorouracil
  modified_base (13)..(13): um
  modified_base (14)..(14): 2'-fluorocytosine
  modified_base (15)..(15): gm
  modified_base (16)..(16): 2'-fluoroadenine
  modified_base (17)..(17): gm
  modified_base (18)..(18): 2'-fluorocytosine
  modified_base (19)..(19): cm
  modified_base (20)..(20): um
  modified_base (21)..(21): 2'-fluoroadenine
uaccuuguguuuucgagccua

SEQ ID NO: 2020 - RNA, 21 nt, Artificial Sequence
  siRNA sense strand against APCS
  modified_base (1)..(1): um
  modified_base (2)..(2): 2'-O-methyladenosine
  modified_base (3)..(4): cm
  modified_base (5)..(6): um
  modified_base (7)..(7): 2'-fluoroguanine
  modified_base (8)..(8): um
  modified_base (9)..(9): 2'-fluoroguanine
  modified_base (10)..(10): um
  modified_base (11)..(12): 2'-fluorouracil
  modified_base (13)..(13): um
  modified_base (14)..(14): cm
  modified_base (15)..(15): gm
  modified_base (16)..(16): 2'-O-methyladenosine
  modified_base (17)..(17): gm
  modified_base (18)..(19): cm
  modified_base (20)..(20): um
  modified_base (21)..(21): 2'-O-methyladenosine
uaccuuguguuuucgagccua

SEQ ID NO: 2021 - RNA, 21 nt, Artificial Sequence
  siRNA sense strand against APCS
  modified_base (1)..(1): um
  modified_base (2)..(2): 2'-O-methyladenosine
  modified_base (3)..(3): 2'-fluorocytosine
  modified_base (4)..(4): cm
  modified_base (5)..(5): 2'-fluorouracil
  modified_base (6)..(6): um
  modified_base (7)..(7): 2'-fluoroguanine
  modified_base (8)..(8): um
  modified_base (9)..(9): 2'-fluoroguanine
  modified_base (10)..(10): um
  modified_base (11)..(12): 2'-fluorouracil
  modified_base (13)..(13): um
  modified_base (14)..(14): 2'-fluorocytosine
  modified_base (15)..(15): gm
  modified_base (16)..(16): 2'-fluoroadenine
  modified_base (17)..(17): gm
  modified_base (18)..(19): cm
  modified_base (20)..(20): um
  modified_base (21)..(21): 2'-O-methyladenosine
uaccuuguguuuucgagccua

SEQ ID NO: 2022 - RNA, 21 nt, Artificial Sequence
  siRNA sense strand against APCS
  modified_base (1)..(1): um
  modified_base (2)..(4): gm
  modified_base (5)..(5): um
  modified_base (6)..(6): cm
  modified_base (7)..(7): 2'-fluorouracil
  modified_base (8)..(8): gm
  modified_base (9)..(9): 2'-fluoroadenine
  modified_base (10)..(10): gm
  modified_base (11)..(11): 2'-fluoroguanine
  modified_base (12)..(12): 2'-fluorouracil
  modified_base (13)..(13): cm
  modified_base (14)..(15): um
  modified_base (16)..(16): gm
  modified_base (17)..(17): 2'-O-methyladenosine
  modified_base (18)..(18): cm
  modified_base (19)..(19): um
  modified_base (20)..(20): cm
  modified_base (21)..(21): 2'-O-methyladenosine
ugggucugaggucuugacuca

SEQ ID NO: 2023 - RNA, 21 nt, Artificial Sequence
  siRNA sense strand against APCS
  modified_base (1)..(1): um
  modified_base (2)..(2): gm
  modified_base (3)..(3): 2'-fluoroguanine
  modified_base (4)..(4): gm
  modified_base (5)..(5): 2'-fluorouracil
  modified_base (6)..(6): cm
  modified_base (7)..(7): 2'-fluorouracil
  modified_base (8)..(8): gm
  modified_base (9)..(9): 2'-fluoroadenine
  modified_base (10)..(10): gm
  modified_base (11)..(11): 2'-fluoroguanine
  modified_base (12)..(12): 2'-fluorouracil
  modified_base (13)..(13): cm
  modified_base (14)..(14): 2'-fluorouracil
  modified_base (15)..(15): um
  modified_base (16)..(16): 2'-fluoroguanine
  modified_base (17)..(17): 2'-O-methyladenosine
  modified_base (18)..(18): cm
  modified_base (19)..(19): um
  modified_base (20)..(20): cm
  modified_base (21)..(21): 2'-O-methyladenosine
ugggucugaggucuugacuca

SEQ ID NO: 2024 - RNA, 21 nt, Artificial Sequence
  siRNA sense strand against APCS
  modified_base (1)..(1): 2'-fluoroadenine
  modified_base (2)..(2): gm
  modified_base (3)..(3): 2'-fluoroadenine
  modified_base (4)..(4): gm
  modified_base (5)..(5): 2'-fluorocytosine
  modified_base (6)..(6): 2'-O-methyladenosine
  modified_base (7)..(7): 2'-fluorocytosine
  modified_base (8)..(8): um
  modified_base (9)..(9): 2'-fluorouracil
  modified_base (10)..(10): gm
  modified_base (11)..(12): 2'-fluoroadenine
  modified_base (13)..(13): 2'-O-methyladenosine
  modified_base (14)..(14): 2'-fluoroadenine
  modified_base (15)..(15): um
  modified_base (16)..(16): 2'-fluoroguanine
  modified_base (17)..(17): 2'-O-methyladenosine
  modified_base (18)..(18): 2'-fluoroadenine
  modified_base (19)..(19): 2'-O-methyladenosine
  modified_base (20)..(20): um
  modified_base (21)..(21): 2'-fluoroguanine
agagcacuugaaaaugaaaug

SEQ ID NO: 2025 - RNA, 21 nt, Artificial Sequence
  siRNA sense strand against APCS
  modified_base (1)..(1): 2'-O-methyladenosine
  modified_base (2)..(2): gm
  modified_base (3)..(3): 2'-O-methyladenosine
  modified_base (4)..(4): gm
  modified_base (5)..(5): cm
  modified_base (6)..(6): 2'-O-methyladenosine
  modified_base (7)..(7): 2'-fluorocytosine
  modified_base (8)..(8): um
  modified_base (9)..(9): 2'-fluorouracil
  modified_base (10)..(10): gm
  modified_base (11)..(12): 2'-fluoroadenine
  modified_base (13)..(14): 2'-O-methyladenosine
  modified_base (15)..(15): um
  modified_base (16)..(16): gm
  modified_base (17)..(19): 2'-O-methyladenosine
  modified_base (20)..(20): um
  modified_base (21)..(21): gm
agagcacuugaaaaugaaaug

SEQ ID NO: 2026 - RNA, 21 nt, Artificial Sequence
  siRNA sense strand against APCS
  modified_base (1)..(1): 2'-O-methyladenosine
  modified_base (2)..(2): gm
  modified_base (3)..(3): 2'-fluoroadenine
  modified_base (4)..(4): gm
  modified_base (5)..(5): 2'-fluorocytosine
  modified_base (6)..(6): 2'-O-methyladenosine
  modified_base (7)..(7): 2'-fluorocytosine
  modified_base (8)..(8): um
  modified_base (9)..(9): 2'-fluorouracil
  modified_base (10)..(10): gm
  modified_base (11)..(12): 2'-fluoroadenine
  modified_base (13)..(13): 2'-O-methyladenosine
  modified_base (14)..(14): 2'-fluoroadenine
  modified_base (15)..(15): um
  modified_base (16)..(16): 2'-fluoroguanine
  modified_base (17)..(19): 2'-O-methyladenosine
  modified_base (20)..(20): um
  modified_base (21)..(21): gm
agagcacuugaaaaugaaaug

SEQ ID NO: 2027 - RNA, 21 nt, Artificial Sequence
  siRNA sense strand against APCS
  modified_base (1)..(1): 2'-fluorouracil
  modified_base (2)..(2): cm
  modified_base (3)..(3): 2'-fluorouracil
  modified_base (4)..(4): gm
  modified_base (5)..(5): 2'-fluorocytosine
  modified_base (6)..(6): 2'-O-methyladenosine
  modified_base (7)..(7): 2'-fluoroguanine
  modified_base (8)..(8): cm
  modified_base (9)..(9): 2'-fluorouracil
  modified_base (10)..(10): cm
  modified_base (11)..(12): 2'-fluorouracil
  modified_base (13)..(13): um
  modified_base (14)..(14): 2'-fluorocytosine
  modified_base (15)..(15): um
  modified_base (16)..(16): 2'-fluorouracil
  modified_base (17)..(17): cm
  modified_base (18)..(18): 2'-fluorouracil
  modified_base (19)..(20): um
  modified_base (21)..(21): 2'-fluoroguanine
ucugcagcucuuucuucuuug

SEQ ID NO: 2028 - RNA, 21 nt, Artificial Sequence
  siRNA sense strand against APCS
  modified_base (1)..(1): um
  modified_base (2)..(2): cm
  modified_base (3)..(3): um
  modified_base (4)..(4): gm
  modified_base (5)..(5): cm
  modified_base (6)..(6): 2'-O-methyladenosine
  modified_base (7)..(7): 2'-fluoroguanine
  modified_base (8)..(8): cm
  modified_base (9)..(9): 2'-fluorouracil
  modified_base (10)..(10): cm
  modified_base (11)..(12): 2'-fluorouracil
  modified_base (13)..(13): um
  modified_base (14)..(14): cm
  modified_base (15)..(16): um
  modified_base (17)..(17): cm
  modified_base (18)..(20): um
  modified_base (21)..(21): gm
ucugcagcucuuucuucuuug

SEQ ID NO: 2029 - RNA, 21 nt, Artificial Sequence
  siRNA sense strand against APCS
  modified_base (1)..(1): um
  modified_base (2)..(2): cm
  modified_base (3)..(3): 2'-fluorouracil
  modified_base (4)..(4): gm
  modified_base (5)..(5): 2'-fluorocytosine
  modified_base (6)..(6): 2'-O-methyladenosine
  modified_base (7)..(7): 2'-fluoroguanine
  modified_base (8)..(8): cm
  modified_base (9)..(9): 2'-fluorouracil
  modified_base (10)..(10): cm
  modified_base (11)..(12): 2'-fluorouracil
  modified_base (13)..(13): um
  modified_base (14)..(14): 2'-fluorocytosine
  modified_base (15)..(15): um
  modified_base (16)..(16): 2'-fluorouracil
  modified_base (17)..(17): cm
  modified_base (18)..(20): um
  modified_base (21)..(21): gm
ucugcagcucuuucuucuuug

SEQ ID NO: 2030 - RNA, 21 nt, Artificial Sequence
  siRNA sense strand against APCS
  modified_base (1)..(1): gm
  modified_base (2)..(2): cm
  modified_base (3)..(3): 2'-O-methyladenosine
  modified_base (4)..(4): gm
  modified_base (5)..(5): cm
  modified_base (6)..(6): um
  modified_base (7)..(7): 2'-fluorocytosine
  modified_base (8)..(8): um
  modified_base (9)..(9): 2'-fluorouracil
  modified_base (10)..(10): um
  modified_base (11)..(11): 2'-fluorocytosine
  modified_base (12)..(12): 2'-fluorouracil
  modified_base (13)..(13): um
  modified_base (14)..(14): cm
  modified_base (15)..(17): um
  modified_base (18)..(18): gm
  modified_base (19)..(20): 2'-O-methyladenosine
  modified_base (21)..(21): um
gcagcucuuucuucuuugaau

SEQ ID NO: 2031 - RNA, 21 nt, Artificial Sequence
  siRNA sense strand against APCS
  modified_base (1)..(1): gm
  modified_base (2)..(2): cm
  modified_base (3)..(3): 2'-fluoroadenine
  modified_base (4)..(4): gm
  modified_base (5)..(5): 2'-fluorocytosine
  modified_base (6)..(6): um
  modified_base (7)..(7): 2'-fluorocytosine
  modified_base (8)..(8): um
  modified_base (9)..(9): 2'-fluorouracil
  modified_base (10)..(10): um
  modified_base (11)..(11): 2'-fluorocytosine
  modified_base (12)..(12): 2'-fluorouracil
  modified_base (13)..(13): um
  modified_base (14)..(14): 2'-fluorocytosine
  modified_base (15)..(15): um
  modified_base (16)..(16): 2'-fluorouracil
  modified_base (17)..(17): um
  modified_base (18)..(18): gm
  modified_base (19)..(20): 2'-O-methyladenosine
  modified_base (21)..(21): um
gcagcucuuucuucuuugaau

SEQ ID NO: 2032 - RNA, 21 nt, Artificial Sequence
  siRNA sense strand against APCS
  modified_base (1)..(1): cm
  modified_base (2)..(2): 2'-O-methyladenosine
  modified_base (3)..(3): gm
  modified_base (4)..(4): cm
  modified_base (5)..(5): um
  modified_base (6)..(6): cm
  modified_base (7)..(7): 2'-fluorouracil
  modified_base (8)..(8): um
  modified_base (9)..(9): 2'-fluorouracil
  modified_base (10)..(10): cm
  modified_base (11)..(12): 2'-fluorouracil
  modified_base (13)..(13): cm
  modified_base (14)..(16): um
  modified_base (17)..(17): gm
  modified_base (18)..(19): 2'-O-methyladenosine
  modified_base (20)..(21): um
cagcucuuucuucuuugaauu

SEQ ID NO: 2033 - RNA, 21 nt, Artificial Sequence
  siRNA sense strand against APCS
  modified_base (1)..(1): cm
  modified_base (2)..(2): 2'-O-methyladenosine
  modified_base (3)..(3): 2'-fluoroguanine
  modified_base (4)..(4): cm
  modified_base (5)..(5): 2'-fluorouracil
  modified_base (6)..(6): cm
  modified_base (7)..(7): 2'-fluorouracil
  modified_base (8)..(8): um
  modified_base (9)..(9): 2'-fluorouracil
  modified_base (10)..(10): cm
  modified_base (11)..(12): 2'-fluorouracil
  modified_base (13)..(13): cm
  modified_base (14)..(14): 2'-fluorouracil
  modified_base (15)..(15): um
  modified_base (16)..(16): 2'-fluorouracil
  modified_base (17)..(17): gm
  modified_base (18)..(19): 2'-O-methyladenosine
  modified_base (20)..(21): um
cagcucuuucuucuuugaauu

SEQ ID NO: 2034 - RNA, 21 nt, Artificial Sequence
  siRNA sense strand against APCS
  modified_base (1)..(2): um
  modified_base (3)..(3): gm
  modified_base (4)..(5): 2'-O-methyladenosine
  modified_base (6)..(6): um
  modified_base (7)..(7): 2'-fluorouracil
  modified_base (8)..(8): um
  modified_base (9)..(9): 2'-fluorocytosine
  modified_base (10)..(10): cm
  modified_base (11)..(11): 2'-fluorouracil
  modified_base (12)..(12): 2'-fluoroadenine
  modified_base (13)..(13): um
  modified_base (14)..(14): cm
  modified_base (15)..(15): um
  modified_base (16)..(16): gm
  modified_base (17)..(17): um
  modified_base (18)..(18): 2'-O-methyladenosine
  modified_base (19)..(19): um
  modified_base (20)..(20): gm
  modified_base (21)..(21): um
uugaauuuccuaucuguaugu

SEQ ID NO: 2035 - RNA, 21 nt, Artificial Sequence
  siRNA sense strand against APCS
  modified_base (1)..(2): um
  modified_base (3)..(3): 2'-fluoroguanine
  modified_base (4)..(4): 2'-O-methyladenosine
  modified_base (5)..(5): 2'-fluoroadenine
  modified_base (6)..(6): um
  modified_base (7)..(7): 2'-fluorouracil
  modified_base (8)..(8): um
  modified_base (9)..(9): 2'-fluorocytosine
  modified_base (10)..(10): cm
  modified_base (11)..(11): 2'-fluorouracil
  modified_base (12)..(12): 2'-fluoroadenine
  modified_base (13)..(13): um
  modified_base (14)..(14): 2'-fluorocytosine
  modified_base (15)..(15): um
  modified_base (16)..(16): 2'-fluoroguanine
  modified_base (17)..(17): um
  modified_base (18)..(18): 2'-O-methyladenosine
  modified_base (19)..(19): um
  modified_base (20)..(20): gm
  modified_base (21)..(21): um
uugaauuuccuaucuguaugu

SEQ ID NO: 2036 - RNA, 21 nt, Artificial Sequence
  siRNA sense strand against APCS
agagcacuugaaaaugaaaua

SEQ ID NO: 2037 - RNA, 21 nt, Artificial Sequence
  siRNA sense strand against APCS
  modified_base (1)..(1): 2'-fluoroadenine
  modified_base (2)..(2): gm
  modified_base (3)..(3): 2'-fluoroadenine
  modified_base (4)..(4): gm
  modified_base (5)..(5): 2'-fluorocytosine
  modified_base (6)..(6): 2'-O-methyladenosine
  modified_base (7)..(7): 2'-fluorocytosine
  modified_base (8)..(8): um
  modified_base (9)..(9): 2'-fluorouracil
  modified_base (10)..(10): gm
  modified_base (11)..(12): 2'-fluoroadenine
  modified_base (13)..(13): 2'-O-methyladenosine
  modified_base (14)..(14): 2'-fluoroadenine
  modified_base (15)..(15): um
  modified_base (16)..(16): 2'-fluoroguanine
  modified_base (17)..(17): 2'-O-methyladenosine
  modified_base (18)..(18): 2'-fluoroadenine
  modified_base (19)..(19): 2'-O-methyladenosine
  modified_base (20)..(20): 2'-fluorouracil
  modified_base (21)..(21): 2'-O-methyladenosine
agagcacuugaaaaugaaaua

SEQ ID NO: 2038 - RNA, 21 nt, Artificial Sequence
  siRNA sense strand against APCS
  modified_base (1)..(1): 2'-O-methyladenosine
  modified_base (2)..(2): gm
  modified_base (3)..(3): 2'-O-methyladenosine
  modified_base (4)..(4): gm
  modified_base (5)..(5): cm
  modified_base (6)..(6): 2'-O-methyladenosine
  modified_base (7)..(7): 2'-fluorocytosine
  modified_base (8)..(8): um
  modified_base (9)..(9): 2'-fluorouracil
  modified_base (10)..(10): gm
  modified_base (11)..(12): 2'-fluoroadenine
  modified_base (13)..(14): 2'-O-methyladenosine
  modified_base (15)..(15): um
  modified_base (16)..(16): gm
  modified_base (17)..(19): 2'-O-methyladenosine
  modified_base (20)..(20): um
  modified_base (21)..(21): 2'-O-methyladenosine
agagcacuugaaaaugaaaua

SEQ ID NO: 2039 - RNA, 21 nt, Artificial Sequence
  siRNA sense strand against APCS
  modified_base (1)..(1): 2'-O-methyladenosine
  modified_base (2)..(2): gm
  modified_base (3)..(3): 2'-fluoroadenine
  modified_base (4)..(4): gm
  modified_base (5)..(5): 2'-fluorocytosine
  modified_base (6)..(6): 2'-O-methyladenosine
  modified_base (7)..(7): 2'-fluorocytosine
  modified_base (8)..(8): um
  modified_base (9)..(9): 2'-fluorouracil
  modified_base (10)..(10): gm
  modified_base (11)..(12): 2'-fluoroadenine
  modified_base (13)..(13): 2'-O-methyladenosine
  modified_base (14)..(14): 2'-fluoroadenine
  modified_base (15)..(15): um
  modified_base (16)..(16): 2'-fluoroguanine
  modified_base (17)..(19): 2'-O-methyladenosine
  modified_base (20)..(20): um
  modified_base (21)..(21): 2'-O-methyladenosine
agagcacuugaaaaugaaaua

SEQ ID NO: 2040 - RNA, 21 nt, Artificial Sequence
  siRNA sense strand against APCS
ucugcagcucuuucuucuuua

SEQ ID NO: 2041 - RNA, 21 nt, Artificial Sequence
  siRNA sense strand against APCS
  modified_base (1)..(1): 2'-fluorouracil
  modified_base (2)..(2): cm
  modified_base (3)..(3): 2'-fluorouracil
  modified_base (4)..(4): gm
  modified_base (5)..(5): 2'-fluorocytosine
  modified_base (6)..(6): 2'-O-methyladenosine
  modified_base (7)..(7): 2'-fluoroguanine
  modified_base (8)..(8): cm
  modified_base (9)..(9): 2'-fluorouracil
  modified_base (10)..(10): cm
  modified_base (11)..(12): 2'-fluorouracil
  modified_base (13)..(13): um
  modified_base (14)..(14): 2'-fluorocytosine
  modified_base (15)..(15): um
  modified_base (16)..(16): 2'-fluorouracil
  modified_base (17)..(17): cm
  modified_base (18)..(18): 2'-fluorouracil
  modified_base (19)..(19): um
  modified_base (20)..(20): 2'-fluorouracil
  modified_base (21)..(21): 2'-O-methyladenosine
ucugcagcucuuucuucuuua

SEQ ID NO: 2042 - RNA, 21 nt, Artificial Sequence
  siRNA sense strand against APCS
  modified_base (1)..(1): um
  modified_base (2)..(2): cm
  modified_base (3)..(3): um
  modified_base (4)..(4): gm
  modified_base (5)..(5): cm
  modified_base (6)..(6): 2'-O-methyladenosine
  modified_base (7)..(7): 2'-fluoroguanine
  modified_base (8)..(8): cm
  modified_base (9)..(9): 2'-fluorouracil
  modified_base (10)..(10): cm
  modified_base (11)..(12): 2'-fluorouracil
  modified_base (13)..(13): um
  modified_base (14)..(14): cm
  modified_base (15)..(16): um
  modified_base (17)..(17): cm
  modified_base (18)..(20): um
  modified_base (21)..(21): 2'-O-methyladenosine
ucugcagcucuuucuucuuua

SEQ ID NO: 2043 - RNA, 21 nt, Artificial Sequence
  siRNA sense strand against APCS
  modified_base (1)..(1): um
  modified_base (2)..(2): cm
  modified_base (3)..(3): 2'-fluorouracil
  modified_base (4)..(4): gm
  modified_base (5)..(5): 2'-fluorocytosine
  modified_base (6)..(6): 2'-O-methyladenosine
  modified_base (7)..(7): 2'-fluoroguanine
  modified_base (8)..(8): cm
  modified_base (9)..(9): 2'-fluorouracil
  modified_base (10)..(10): cm
  modified_base (11)..(12): 2'-fluorouracil
  modified_base (13)..(13): um
  modified_base (14)..(14): 2'-fluorocytosine
  modified_base (15)..(15): um
  modified_base (16)..(16): 2'-fluorouracil
  modified_base (17)..(17): cm
  modified_base (18)..(20): um
  modified_base (21)..(21): 2'-O-methyladenosine
ucugcagcucuuucuucuuua

SEQ ID NO: 2044 - RNA, 23 nt, Artificial Sequence
  siRNA antisense strand against APCS
  modified_base (1)..(1): um
  modified_base (2)..(2): 2'-fluoroadenine
  modified_base (3)..(3): 2'-fluoroguanine
  modified_base (4)..(4): gm
  modified_base (5)..(5): 2'-fluorocytosine
  modified_base (6)..(6): um
  modified_base (7)..(7): 2'-fluorocytosine
  modified_base (8)..(8): gm
  modified_base (9)..(9): 2'-fluoroadenine
  modified_base (10)..(11): 2'-O-methyladenosine
  modified_base (12)..(12): 2'-fluoroadenine
  modified_base (13)..(13): cm
  modified_base (14)..(14): 2'-fluoroadenine
  modified_base (15)..(15): cm
  modified_base (16)..(16): 2'-fluoroadenine
  modified_base (17)..(17): 2'-O-methyladenosine
  modified_base (18)..(18): 2'-fluoroguanine
  modified_base (19)..(19): gm
  modified_base (20)..(20): 2'-fluorouracil
  modified_base (21)..(21): 2'-O-methyladenosine
  modified_base (22)..(22): 2'-fluoroadenine
  modified_base (23)..(23): 2'-O-methyladenosine
uaggcucgaaaacacaagguaaa

SEQ ID NO: 2045 - RNA, 23 nt, Artificial Sequence
  siRNA antisense strand against APCS
  modified_base (1)..(1): um
  modified_base (2)..(2): 2'-fluoroadenine
  modified_base (3)..(4): 2'-fluoroguanine
  modified_base (5)..(5): 2'-fluorocytosine
  modified_base (6)..(6): 2'-fluorouracil
  modified_base (7)..(7): 2'-fluorocytosine
  modified_base (8)..(8): 2'-fluoroguanine
  modified_base (9)..(9): 2'-fluoroadenine
  modified_base (10)..(11): 2'-O-methyladenosine
  modified_base (12)..(12): 2'-fluoroadenine
  modified_base (13)..(13): cm
  modified_base (14)..(14): 2'-fluoroadenine
  modified_base (15)..(15): cm
  modified_base (16)..(17): 2'-fluoroadenine
  modified_base (18)..(19): 2'-fluoroguanine
  modified_base (20)..(20): 2'-fluorouracil
  modified_base (21)..(22): 2'-fluoroadenine
  modified_base (23)..(23): 2'-O-methyladenosine
uaggcucgaaaacacaagguaaa

SEQ ID NO: 2046 - RNA, 23 nt, Artificial Sequence
  siRNA antisense strand against APCS
  modified_base (1)..(1): um
  modified_base (2)..(2): 2'-fluoroadenine
  modified_base (3)..(3): 2'-fluoroguanine
  modified_base (4)..(4): gm
  modified_base (5)..(5): 2'-fluorocytosine
  modified_base (6)..(6): um
  modified_base (7)..(7): 2'-fluorocytosine
  modified_base (8)..(8): gm
  modified_base (9)..(9): 2'-fluoroadenine
  modified_base (10)..(11): 2'-O-methyladenosine
  modified_base (12)..(12): 2'-fluoroadenine
  modified_base (13)..(13): cm
  modified_base (14)..(14): 2'-fluoroadenine
  modified_base (15)..(15): cm
  modified_base (16)..(16): 2'-fluoroadenine
  modified_base (17)..(17): 2'-O-methyladenosine
  modified_base (18)..(18): 2'-fluoroguanine
  modified_base (19)..(19): gm
  modified_base (20)..(20): um
  modified_base (21)..(23): 2'-O-methyladenosine
uaggcucgaaaacacaagguaaa

SEQ ID NO: 2047 - RNA, 23 nt, Artificial Sequence
  siRNA antisense strand against APCS
  modified_base (1)..(1): um
  modified_base (2)..(2): 2'-fluoroguanine
  modified_base (3)..(3): 2'-fluoroadenine
  modified_base (4)..(4): 2'-fluoroguanine
  modified_base (5)..(5): 2'-fluorouracil
  modified_base (6)..(6): 2'-fluorocytosine
  modified_base (7)..(8): 2'-fluoroadenine
  modified_base (9)..(9): 2'-fluoroguanine
  modified_base (10)..(10): 2'-O-methyladenosine
  modified_base (11)..(11): cm
  modified_base (12)..(12): 2'-fluorocytosine
  modified_base (13)..(13): um
  modified_base (14)..(14): 2'-fluorocytosine
  modified_base (15)..(15): 2'-O-methyladenosine
  modified_base (16)..(16): 2'-fluoroguanine
  modified_base (17)..(17): 2'-fluoroadenine
  modified_base (18)..(20): 2'-fluorocytosine
  modified_base (21)..(21): 2'-fluoroadenine
  modified_base (22)..(22): 2'-fluorocytosine
  modified_base (23)..(23): 2'-O-methyladenosine
ugagucaagaccucagacccaca

SEQ ID NO: 2048 - RNA, 23 nt, Artificial Sequence
  siRNA antisense strand against APCS
  modified_base (1)..(1): um
  modified_base (2)..(2): 2'-fluoroguanine
  modified_base (3)..(3): 2'-fluoroadenine
  modified_base (4)..(4): gm
  modified_base (5)..(5): 2'-fluorouracil
  modified_base (6)..(6): cm
  modified_base (7)..(7): 2'-fluoroadenine
  modified_base (8)..(8): 2'-O-methyladenosine
  modified_base (9)..(9): 2'-fluoroguanine
  modified_base (10)..(10): 2'-O-methyladenosine
  modified_base (11)..(11): cm
  modified_base (12)..(12): 2'-fluorocytosine
  modified_base (13)..(13): um
  modified_base (14)..(14): 2'-fluorocytosine
  modified_base (15)..(15): 2'-O-methyladenosine
  modified_base (16)..(16): 2'-fluoroguanine
  modified_base (17)..(17): 2'-O-methyladenosine
  modified_base (18)..(18): 2'-fluorocytosine
  modified_base (19)..(20): cm
  modified_base (21)..(21): 2'-O-methyladenosine
  modified_base (22)..(22): cm
  modified_base (23)..(23): 2'-O-methyladenosine
ugagucaagaccucagacccaca

SEQ ID NO: 2049 - RNA, 23 nt, Artificial Sequence
  siRNA antisense strand against APCS
  modified_base (1)..(1): cm
  modified_base (2)..(2): 2'-fluoroadenine
  modified_base (3)..(3): 2'-fluorouracil
  modified_base (4)..(4): um
  modified_base (5)..(5): 2'-fluorouracil
  modified_base (6)..(6): cm
  modified_base (7)..(7): 2'-fluoroadenine
  modified_base (8)..(8): um
  modified_base (9)..(9): 2'-fluorouracil
  modified_base (10)..(11): um
  modified_base (12)..(12): 2'-fluorocytosine
  modified_base (13)..(13): 2'-O-methyladenosine
  modified_base (14)..(14): 2'-fluoroadenine
  modified_base (15)..(15): gm
  modified_base (16)..(16): 2'-fluorouracil
  modified_base (17)..(17): gm
  modified_base (18)..(18): 2'-fluorocytosine
  modified_base (19)..(19): um
  modified_base (20)..(20): 2'-fluorocytosine
  modified_base (21)..(21): um
  modified_base (22)..(22): 2'-fluorocytosine
  modified_base (23)..(23): gm
cauuucauuuucaagugcucucg

SEQ ID NO: 2050 - RNA, 23 nt, Artificial Sequence
  siRNA antisense strand against APCS
  modified_base (1)..(1): cm
  modified_base (2)..(2): 2'-fluoroadenine
  modified_base (3)..(5): 2'-fluorouracil
  modified_base (6)..(6): 2'-fluorocytosine
  modified_base (7)..(7): 2'-fluoroadenine
  modified_base (8)..(9): 2'-fluorouracil
  modified_base (10)..(11): um
  modified_base (12)..(12): 2'-fluorocytosine
  modified_base (13)..(13): 2'-O-methyladenosine
  modified_base (14)..(14): 2'-fluoroadenine
  modified_base (15)..(15): gm
  modified_base (16)..(16): 2'-fluorouracil
  modified_base (17)..(17): 2'-fluoroguanine
  modified_base (18)..(18): 2'-fluorocytosine
  modified_base (19)..(19): 2'-fluorouracil
  modified_base (20)..(20): 2'-fluorocytosine
  modified_base (21)..(21): 2'-fluorouracil
  modified_base (22)..(22): 2'-fluorocytosine
  modified_base (23)..(23): gm
cauuucauuuucaagugcucucg

SEQ ID NO: 2051 - RNA, 23 nt, Artificial Sequence
  siRNA antisense strand against APCS
  modified_base (1)..(1): cm
  modified_base (2)..(2): 2'-fluoroadenine
  modified_base (3)..(3): 2'-fluorouracil
  modified_base (4)..(4): um
  modified_base (5)..(5): 2'-fluorouracil
  modified_base (6)..(6): cm
  modified_base (7)..(7): 2'-fluoroadenine
  modified_base (8)..(8): um
  modified_base (9)..(9): 2'-fluorouracil
  modified_base (10)..(11): um
  modified_base (12)..(12): 2'-fluorocytosine
  modified_base (13)..(13): 2'-O-methyladenosine
  modified_base (14)..(14): 2'-fluoroadenine
  modified_base (15)..(15): gm
  modified_base (16)..(16): 2'-fluorouracil
  modified_base (17)..(17): gm
  modified_base (18)..(18): 2'-fluorocytosine
  modified_base (19)..(19): um
  modified_base (20)..(20): cm
  modified_base (21)..(21): um
  modified_base (22)..(22): cm
  modified_base (23)..(23): gm
cauuucauuuucaagugcucucg

SEQ ID NO: 2052 - RNA, 23 nt, Artificial Sequence
  siRNA antisense strand against APCS
  modified_base (1)..(1): cm
  modified_base (2)..(3): 2'-fluoroadenine
  modified_base (4)..(4): 2'-O-methyladenosine
  modified_base (5)..(5): 2'-fluoroguanine
  modified_base (6)..(6): 2'-O-methyladenosine
  modified_base (7)..(7): 2'-fluoroadenine
  modified_base (8)..(8): gm
  modified_base (9)..(9): 2'-fluoroadenine
  modified_base (10)..(11): 2'-O-methyladenosine
  modified_base (12)..(12): 2'-fluoroguanine
  modified_base (13)..(13): 2'-O-methyladenosine
  modified_base (14)..(14): 2'-fluoroguanine
  modified_base (15)..(15): cm
  modified_base (16)..(16): 2'-fluorouracil
  modified_base (17)..(17): gm
  modified_base (18)..(18): 2'-fluorocytosine
  modified_base (19)..(19): 2'-O-methyladenosine
  modified_base (20)..(20): 2'-fluoroguanine
  modified_base (21)..(21): 2'-O-methyladenosine
  modified_base (22)..(22): 2'-fluorouracil
  modified_base (23)..(23): gm
caaagaagaaagagcugcagaug

SEQ ID NO: 2053 - RNA, 23 nt, Artificial Sequence
  siRNA antisense strand against APCS
  modified_base (1)..(1): cm
  modified_base (2)..(4): 2'-fluoroadenine
  modified_base (5)..(5): 2'-fluoroguanine
  modified_base (6)..(7): 2'-fluoroadenine
  modified_base (8)..(8): 2'-fluoroguanine
  modified_base (9)..(9): 2'-fluoroadenine
  modified_base (10)..(11): 2'-O-methyladenosine
  modified_base (12)..(12): 2'-fluoroguanine
  modified_base (13)..(13): 2'-O-methyladenosine
  modified_base (14)..(14): 2'-fluoroguanine
  modified_base (15)..(15): cm
  modified_base (16)..(16): 2'-fluorouracil
  modified_base (17)..(17): 2'-fluoroguanine
  modified_base (18)..(18): 2'-fluorocytosine
  modified_base (19)..(19): 2'-fluoroadenine
  modified_base (20)..(20): 2'-fluoroguanine
  modified_base (21)..(21): 2'-fluoroadenine
  modified_base (22)..(22): 2'-fluorouracil
  modified_base (23)..(23): gm
caaagaagaaagagcugcagaug

SEQ ID NO: 2054 - RNA, 23 nt, Artificial Sequence
  siRNA antisense strand against APCS
  modified_base (1)..(1): cm
  modified_base (2)..(3): 2'-fluoroadenine
  modified_base (4)..(4): 2'-O-methyladenosine
  modified_base (5)..(5): 2'-fluoroguanine
  modified_base (6)..(6): 2'-O-methyladenosine
  modified_base (7)..(7): 2'-fluoroadenine
  modified_base (8)..(8): gm
  modified_base (9)..(9): 2'-fluoroadenine
  modified_base (10)..(11): 2'-O-methyladenosine
  modified_base (12)..(12): 2'-fluoroguanine
  modified_base (13)..(13): 2'-O-methyladenosine
  modified_base (14)..(14): 2'-fluoroguanine
  modified_base (15)..(15): cm
  modified_base (16)..(16): 2'-fluorouracil
  modified_base (17)..(17): gm
  modified_base (18)..(18): 2'-fluorocytosine
  modified_base (19)..(19): 2'-O-methyladenosine
  modified_base (20)..(20): gm
  modified_base (21)..(21): 2'-O-methyladenosine
  modified_base (22)..(22): um
  modified_base (23)..(23): gm
caaagaagaaagagcugcagaug

SEQ ID NO: 2055 - RNA, 23 nt, Artificial Sequence
  siRNA antisense strand against APCS
  modified_base (1)..(1): 2'-O-methyladenosine
  modified_base (2)..(3): 2'-fluorouracil
  modified_base (4)..(4): 2'-fluorocytosine
  modified_base (5)..(7): 2'-fluoroadenine
  modified_base (8)..(8): 2'-fluoroguanine
  modified_base (9)..(9): 2'-fluoroadenine
  modified_base (10)..(10): 2'-O-methyladenosine
  modified_base (11)..(11): gm
  modified_base (12)..(12): 2'-fluoroadenine
  modified_base (13)..(13): 2'-O-methyladenosine
  modified_base (14)..(14): 2'-fluoroadenine
  modified_base (15)..(15): gm
  modified_base (16)..(16): 2'-fluoroadenine
  modified_base (17)..(17): 2'-fluoroguanine
  modified_base (18)..(18): 2'-fluorocytosine
  modified_base (19)..(19): 2'-fluorouracil
  modified_base (20)..(20): 2'-fluoroguanine
  modified_base (21)..(21): 2'-fluorocytosine
  modified_base (22)..(22): 2'-fluoroadenine
  modified_base (23)..(23): gm
auucaaagaagaaagagcugcag

SEQ ID NO: 2056 - RNA, 23 nt, Artificial Sequence
  siRNA antisense strand against APCS
  modified_base (1)..(1): 2'-O-methyladenosine
  modified_base (2)..(3): 2'-fluorouracil
  modified_base (4)..(4): cm
  modified_base (5)..(5): 2'-fluoroadenine
  modified_base (6)..(6): 2'-O-methyladenosine
  modified_base (7)..(7): 2'-fluoroadenine
  modified_base (8)..(8): gm
  modified_base (9)..(9): 2'-fluoroadenine
  modified_base (10)..(10): 2'-O-methyladenosine
  modified_base (11)..(11): gm
  modified_base (12)..(12): 2'-fluoroadenine
  modified_base (13)..(13): 2'-O-methyladenosine
  modified_base (14)..(14): 2'-fluoroadenine
  modified_base (15)..(15): gm
  modified_base (16)..(16): 2'-fluoroadenine
  modified_base (17)..(17): gm
  modified_base (18)..(18): 2'-fluorocytosine
  modified_base (19)..(19): um
  modified_base (20)..(20): gm
  modified_base (21)..(21): cm
  modified_base (22)..(22): 2'-O-methyladenosine
  modified_base (23)..(23): gm
auucaaagaagaaagagcugcag

SEQ ID NO: 2057 - RNA, 23 nt, Artificial Sequence
  siRNA antisense strand against APCS
  modified_base (1)..(1): 2'-O-methyladenosine
  modified_base (2)..(2): 2'-fluoroadenine
  modified_base (3)..(4): 2'-fluorouracil
  modified_base (5)..(5): 2'-fluorocytosine
  modified_base (6)..(8): 2'-fluoroadenine
  modified_base (9)..(9): 2'-fluoroguanine
  modified_base (10)..(11): 2'-O-methyladenosine
  modified_base (12)..(12): 2'-fluoroguanine
  modified_base (13)..(13): 2'-O-methyladenosine
  modified_base (14)..(14): 2'-fluoroadenine
  modified_base (15)..(15): 2'-O-methyladenosine
  modified_base (16)..(16): 2'-fluoroguanine
  modified_base (17)..(17): 2'-fluoroadenine
  modified_base (18)..(18): 2'-fluoroguanine
  modified_base (19)..(19): 2'-fluorocytosine
  modified_base (20)..(20): 2'-fluorouracil
  modified_base (21)..(21): 2'-fluoroguanine
  modified_base (22)..(22): 2'-fluorocytosine
  modified_base (23)..(23): 2'-O-methyladenosine
aauucaaagaagaaagagcugca

SEQ ID NO: 2058 - RNA, 23 nt, Artificial Sequence
  siRNA antisense strand against APCS
  modified_base (1)..(1): 2'-O-methyladenosine
  modified_base (2)..(2): 2'-fluoroadenine
  modified_base (3)..(3): 2'-fluorouracil
  modified_base (4)..(4): um
  modified_base (5)..(5): 2'-fluorocytosine
  modified_base (6)..(6): 2'-O-methyladenosine
  modified_base (7)..(7): 2'-fluoroadenine
  modified_base (8)..(8): 2'-O-methyladenosine
  modified_base (9)..(9): 2'-fluoroguanine
  modified_base (10)..(11): 2'-O-methyladenosine
  modified_base (12)..(12): 2'-fluoroguanine
  modified_base (13)..(13): 2'-O-methyladenosine
  modified_base (14)..(14): 2'-fluoroadenine
  modified_base (15)..(15): 2'-O-methyladenosine
  modified_base (16)..(16): 2'-fluoroguanine
  modified_base (17)..(17): 2'-O-methyladenosine
  modified_base (18)..(18): 2'-fluoroguanine
  modified_base (19)..(19): cm
  modified_base (20)..(20): um
  modified_base (21)..(21): gm
  modified_base (22)..(22): cm
  modified_base (23)..(23): 2'-O-methyladenosine
aauucaaagaagaaagagcugca

SEQ ID NO: 2059 - RNA, 23 nt, Artificial Sequence
  siRNA antisense strand against APCS
  modified_base (1)..(1): 2'-O-methyladenosine
  modified_base (2)..(2): 2'-fluorocytosine
  modified_base (3)..(3): 2'-fluoroadenine
  modified_base (4)..(4): 2'-fluorouracil
  modified_base (5)..(5): 2'-fluoroadenine
  modified_base (6)..(6): 2'-fluorocytosine
  modified_base (7)..(7): 2'-fluoroadenine
  modified_base (8)..(8): 2'-fluoroguanine
  modified_base (9)..(9): 2'-fluoroadenine
  modified_base (10)..(10): um
  modified_base (11)..(11): 2'-O-methyladenosine
  modified_base (12)..(12): 2'-fluoroguanine
  modified_base (13)..(13): gm
  modified_base (14)..(14): 2'-fluoroadenine
  modified_base (15)..(15): 2'-O-methyladenosine
  modified_base (16)..(16): 2'-fluoroadenine
  modified_base (17)..(18): 2'-fluorouracil
  modified_base (19)..(19): 2'-fluorocytosine
  modified_base (20)..(22): 2'-fluoroadenine
  modified_base (23)..(23): gm
acauacagauaggaaauucaaag

SEQ ID NO: 2060 - RNA, 23 nt, Artificial Sequence
  siRNA antisense strand against APCS
  modified_base (1)..(1): 2'-O-methyladenosine
  modified_base (2)..(2): 2'-fluorocytosine
  modified_base (3)..(3): 2'-fluoroadenine
  modified_base (4)..(4): um
  modified_base (5)..(5): 2'-fluoroadenine
  modified_base (6)..(6): cm
  modified_base (7)..(7): 2'-fluoroadenine
  modified_base (8)..(8): gm
  modified_base (9)..(9): 2'-fluoroadenine
  modified_base (10)..(10): um
  modified_base (11)..(11): 2'-O-methyladenosine
  modified_base (12)..(12): 2'-fluoroguanine
  modified_base (13)..(13): gm
  modified_base (14)..(14): 2'-fluoroadenine
  modified_base (15)..(15): 2'-O-methyladenosine
  modified_base (16)..(16): 2'-fluoroadenine
  modified_base (17)..(17): um
  modified_base (18)..(18): 2'-fluorouracil
  modified_base (19)..(19): cm
  modified_base (20)..(22): 2'-O-methyladenosine
  modified_base (23)..(23): gm
acauacagauaggaaauucaaag

SEQ ID NO: 2061 - RNA, 23 nt, Artificial Sequence
  siRNA antisense strand against APCS
uauuucauuuucaagugcucucg

SEQ ID NO: 2062 - RNA, 23 nt, Artificial Sequence
  siRNA antisense strand against APCS
  modified_base (1)..(1): 2'-fluorouracil
  modified_base (2)..(2): 2'-O-methyladenosine
  modified_base (3)..(3): 2'-fluorouracil
  modified_base (4)..(4): um
  modified_base (5)..(5): 2'-fluorouracil
  modified_base (6)..(6): cm
  modified_base (7)..(7): 2'-fluoroadenine
  modified_base (8)..(8): um
  modified_base (9)..(9): 2'-fluorouracil
  modified_base (10)..(11): um
  modified_base (12)..(12): 2'-fluorocytosine
  modified_base (13)..(13): 2'-O-methyladenosine
  modified_base (14)..(14): 2'-fluoroadenine
  modified_base (15)..(15): gm
  modified_base (16)..(16): 2'-fluorouracil
  modified_base (17)..(17): gm
  modified_base (18)..(18): 2'-fluorocytosine
  modified_base (19)..(19): um
  modified_base (20)..(20): 2'-fluorocytosine
  modified_base (21)..(21): um
  modified_base (22)..(22): 2'-fluorocytosine
  modified_base (23)..(23): gm
uauuucauuuucaagugcucucg

SEQ ID NO: 2063 - RNA, 23 nt, Artificial Sequence
  siRNA antisense strand against APCS
  modified_base (1)..(1): um
  modified_base (2)..(2): 2'-fluoroadenine
  modified_base (3)..(5): 2'-fluorouracil
  modified_base (6)..(6): 2'-fluorocytosine
  modified_base (7)..(7): 2'-fluoroadenine
  modified_base (8)..(9): 2'-fluorouracil
  modified_base (10)..(11): um
  modified_base (12)..(12): 2'-fluorocytosine
  modified_base (13)..(13): 2'-O-methyladenosine
  modified_base (14)..(14): 2'-fluoroadenine
  modified_base (15)..(15): gm
  modified_base (16)..(16): 2'-fluorouracil
  modified_base (17)..(17): 2'-fluoroguanine
  modified_base (18)..(18): 2'-fluorocytosine
  modified_base (19)..(19): 2'-fluorouracil
  modified_base (20)..(20): 2'-fluorocytosine
  modified_base (21)..(21): 2'-fluorouracil
  modified_base (22)..(22): 2'-fluorocytosine
  modified_base (23)..(23): gm
uauuucauuuucaagugcucucg

SEQ ID NO: 2064 - RNA, 23 nt, Artificial Sequence
  siRNA antisense strand against APCS
  modified_base (1)..(1): um
  modified_base (2)..(2): 2'-fluoroadenine
  modified_base (3)..(3): 2'-fluorouracil
  modified_base (4)..(4): um
  modified_base (5)..(5): 2'-fluorouracil
  modified_base (6)..(6): cm
  modified_base (7)..(7): 2'-fluoroadenine
  modified_base (8)..(8): um
  modified_base (9)..(9): 2'-fluorouracil
  modified_base (10)..(11): um
  modified_base (12)..(12): 2'-fluorocytosine
  modified_base (13)..(13): 2'-O-methyladenosine
  modified_base (14)..(14): 2'-fluoroadenine
  modified_base (15)..(15): gm
  modified_base (16)..(16): 2'-fluorouracil
  modified_base (17)..(17): gm
  modified_base (18)..(18): 2'-fluorocytosine
  modified_base (19)..(19): um
  modified_base (20)..(20): cm
  modified_base (21)..(21): um
  modified_base (22)..(22): cm
  modified_base (23)..(23): gm
uauuucauuuucaagugcucucg

SEQ ID NO: 2065 - RNA, 23 nt, Artificial Sequence
  siRNA antisense strand against APCS
uaaagaagaaagagcugcagaug

SEQ ID NO: 2066 - RNA, 23 nt, Artificial Sequence
  siRNA antisense strand against APCS
  modified_base (1)..(1): 2'-fluorouracil
  modified_base (2)..(2): 2'-O-methyladenosine
  modified_base (3)..(3): 2'-fluoroadenine
  modified_base (4)..(4): 2'-O-methyladenosine
  modified_base (5)..(5): 2'-fluoroguanine
  modified_base (6)..(6): 2'-O-methyladenosine
  modified_base (7)..(7): 2'-fluoroadenine
  modified_base (8)..(8): gm
  modified_base (9)..(9): 2'-fluoroadenine
  modified_base (10)..(11): 2'-O-methyladenosine
  modified_base (12)..(12): 2'-fluoroguanine
  modified_base (13)..(13): 2'-O-methyladenosine
  modified_base (14)..(14): 2'-fluoroguanine
  modified_base (15)..(15): cm
  modified_base (16)..(16): 2'-fluorouracil
  modified_base (17)..(17): gm
  modified_base (18)..(18): 2'-fluorocytosine
  modified_base (19)..(19): 2'-O-methyladenosine
  modified_base (20)..(20): 2'-fluoroguanine
  modified_base (21)..(21): 2'-O-methyladenosine
  modified_base (22)..(22): 2'-fluorouracil
  modified_base (23)..(23): gm
uaaagaagaaagagcugcagaug

SEQ ID NO: 2067 - RNA, 23 nt, Artificial Sequence
  siRNA antisense strand against APCS
  modified_base (1)..(1): um
  modified_base (2)..(4): 2'-fluoroadenine
  modified_base (5)..(5): 2'-fluoroguanine
  modified_base (6)..(7): 2'-fluoroadenine
  modified_base (8)..(8): 2'-fluoroguanine
  modified_base (9)..(9): 2'-fluoroadenine
  modified_base (10)..(11): 2'-O-methyladenosine
  modified_base (12)..(12): 2'-fluoroguanine
  modified_base (13)..(13): 2'-O-methyladenosine
  modified_base (14)..(14): 2'-fluoroguanine
  modified_base (15)..(15): cm
  modified_base (16)..(16): 2'-fluorouracil
  modified_base (17)..(17): 2'-fluoroguanine
  modified_base (18)..(18): 2'-fluorocytosine
  modified_base (19)..(19): 2'-fluoroadenine
  modified_base (20)..(20): 2'-fluoroguanine
  modified_base (21)..(21): 2'-fluoroadenine
  modified_base (22)..(22): 2'-fluorouracil
  modified_base (23)..(23): gm
uaaagaagaaagagcugcagaug

SEQ ID NO: 2068 - RNA, 23 nt, Artificial Sequence
  siRNA antisense strand against APCS
  modified_base (1)..(1): um
  modified_base (2)..(3): 2'-fluoroadenine
  modified_base (4)..(4): 2'-O-methyladenosine
  modified_base (5)..(5): 2'-fluoroguanine
  modified_base (6)..(6): 2'-O-methyladenosine
  modified_base (7)..(7): 2'-fluoroadenine
  modified_base (8)..(8): gm
  modified_base (9)..(9): 2'-fluoroadenine
  modified_base (10)..(11): 2'-O-methyladenosine
  modified_base (12)..(12): 2'-fluoroguanine
  modified_base (13)..(13): 2'-O-methyladenosine
  modified_base (14)..(14): 2'-fluoroguanine
  modified_base (15)..(15): cm
  modified_base (16)..(16): 2'-fluorouracil
  modified_base (17)..(17): gm
  modified_base (18)..(18): 2'-fluorocytosine
  modified_base (19)..(19): 2'-O-methyladenosine
  modified_base (20)..(20): gm
  modified_base (21)..(21): 2'-O-methyladenosine
  modified_base (22)..(22): um
  modified_base (23)..(23): gm
uaaagaagaaagagcugcagaug

SEQ ID NO: 2069 - RNA, 21 nt, Artificial Sequence
  siRNA sense strand against APCS
  modified_base (1)..(1): 2'-fluorouracil
  modified_base (2)..(3): 5'-phosphonothioate
  modified_base (2)..(2): 2'-O-methyladenosine
  modified_base (3)..(3): 2'-fluorocytosine
  modified_base (4)..(4): cm
  modified_base (5)..(5): 2'-fluorouracil
  modified_base (6)..(6): um
  modified_base (7)..(7): 2'-fluoroguanine
  modified_base (8)..(8): um
  modified_base (9)..(9): 2'-fluoroguanine
  modified_base (10)..(10): um
  modified_base (11)..(12): 2'-fluorouracil
  modified_base (13)..(13): um
  modified_base (14)..(14): 2'-fluorocytosine
  modified_base (15)..(15): gm
  modified_base (16)..(16): 2'-fluoroadenine
  modified_base (17)..(17): gm
  modified_base (18)..(18): 2'-fluorocytosine
  modified_base (19)..(19): cm
  modified_base (20)..(20): 2'-fluorouracil
  modified_base (21)..(21): 2'-O-methyladenosine
uaccuuguguuuucgagccua

SEQ ID NO: 2070 - RNA, 21 nt, Artificial Sequence
  siRNA sense strand against APCS
  modified_base (1)..(1): 2'-fluorocytosine
  modified_base (2)..(2): cm
  modified_base (3)..(3): 2'-fluoroadenine
  modified_base (4)..(4): gm
  modified_base (5)..(5): 2'-fluorouracil
  modified_base (6)..(6): cm
  modified_base (7)..(7): 2'-fluorocytosine
  modified_base (8)..(8): um
  modified_base (9)..(9): 2'-fluorouracil
  modified_base (10)..(10): um
  modified_base (11)..(11): 2'-fluoroguanine
  modified_base (12)..(12): 2'-fluorouracil
  modified_base (13)..(13): gm
  modified_base (14)..(14): 2'-fluoroguanine
  modified_base (15)..(15): gm
  modified_base (16)..(16): 2'-fluoroadenine
  modified_base (17)..(17): gm
  modified_base (18)..(18): 2'-fluoroadenine
  modified_base (19)..(19): gm
  modified_base (20)..(20): 2'-fluoroadenine
  modified_base (21)..(21): um
ccaguccuuugugggagagau

SEQ ID NO: 2071 - RNA, 21 nt, Artificial Sequence
  siRNA sense strand against APCS
  modified_base (1)..(1): 2'-fluoroguanine
  modified_base (2)..(2): 2'-O-methyladenosine
  modified_base (3)..(3): 2'-fluoroguanine
  modified_base (4)..(4): 2'-O-methyladenosine
  modified_base (5)..(5): 2'-fluoroguanine
  modified_base (6)..(6): 2'-O-methyladenosine
  modified_base (7)..(7): 2'-fluorouracil
  modified_base (8)..(8): um
  modified_base (9)..(9): 2'-fluoroguanine
  modified_base (10)..(10): gm
  modified_base (11)..(12): 2'-fluoroguanine
  modified_base (13)..(13): 2'-O-methyladenosine
  modified_base (14)..(14): 2'-fluorouracil
  modified_base (15)..(15): um
  modified_base (16)..(16): 2'-fluorouracil
  modified_base (17)..(17): gm
  modified_base (18)..(18): 2'-fluorouracil
  modified_base (19)..(19): 2'-O-methyladenosine
  modified_base (20)..(20): 2'-fluorocytosine
  modified_base (21)..(21): 2'-O-methyladenosine
gagagauuggggauuuguaca

SEQ ID NO: 2072 - RNA, 21 nt, Artificial Sequence
  siRNA sense strand against APCS
  modified_base (1)..(1): 2'-fluorouracil
  modified_base (2)..(3): 5'-phosphonothioate
  modified_base (2)..(2): gm
  modified_base (3)..(3): 2'-fluoroguanine
  modified_base (4)..(4): gm
  modified_base (5)..(5): 2'-fluorouracil
  modified_base (6)..(6): cm
  modified_base (7)..(7): 2'-fluorouracil
  modified_base (8)..(8): gm
  modified_base (9)..(9): 2'-fluoroadenine
  modified_base (10)..(10): gm
  modified_base (11)..(11): 2'-fluoroguanine
  modified_base (12)..(12): 2'-fluorouracil
  modified_base (13)..(13): cm
  modified_base (14)..(14): 2'-fluorouracil
  modified_base (15)..(15): um
  modified_base (16)..(16): 2'-fluoroguanine
  modified_base (17)..(17): 2'-O-methyladenosine
  modified_base (18)..(18): 2'-fluorocytosine
  modified_base (19)..(19): um
  modified_base (20)..(20): 2'-fluorocytosine
  modified_base (21)..(21): 2'-O-methyladenosine
ugggucugaggucuugacuca

SEQ ID NO: 2073 - RNA, 21 nt, Artificial Sequence
  siRNA sense strand against APCS
  modified_base (1)..(1): 2'-fluoroadenine
  modified_base (2)..(3): 5'-phosphonothioate
  modified_base (2)..(2): gm
  modified_base (3)..(3): 2'-fluoroadenine
  modified_base (4)..(4): gm
  modified_base (5)..(5): 2'-fluorocytosine
  modified_base (6)..(6): 2'-O-methyladenosine
  modified_base (7)..(7): 2'-fluorocytosine
  modified_base (8)..(8): um
  modified_base (9)..(9): 2'-fluorouracil
  modified_base (10)..(10): gm
  modified_base (11)..(12): 2'-fluoroadenine
  modified_base (13)..(13): 2'-O-methyladenosine
  modified_base (14)..(14): 2'-fluoroadenine
  modified_base (15)..(15): um
  modified_base (16)..(16): 2'-fluoroguanine
  modified_base (17)..(17): 2'-O-methyladenosine
  modified_base (18)..(18): 2'-fluoroadenine
  modified_base (19)..(19): 2'-O-methyladenosine
  modified_base (20)..(20): 2'-fluorouracil
  modified_base (21)..(21): gm
agagcacuugaaaaugaaaug

SEQ ID NO: 2074 - RNA, 21 nt, Artificial Sequence
  siRNA sense strand against APCS
  modified_base (1)..(1): 2'-fluoroguanine
  modified_base (2)..(3): 5'-phosphonothioate
  modified_base (2)..(2): cm
  modified_base (3)..(3): 2'-fluoroadenine
  modified_base (4)..(4): 2'-O-methyladenosine
  modified_base (5)..(5): 2'-fluorocytosine
  modified_base (6)..(6): um
  modified_base (7)..(7): 2'-fluoroguanine
  modified_base (8)..(8): gm
  modified_base (9)..(9): 2'-fluoroadenine
  modified_base (10)..(10): um
  modified_base (11)..(11): 2'-fluoroadenine
  modified_base (12)..(12): 2'-fluorocytosine
  modified_base (13)..(13): um
  modified_base (14)..(14): 2'-fluoroadenine
  modified_base (15)..(15): gm
  modified_base (16)..(16): 2'-fluoroadenine
  modified_base (17)..(17): um
  modified_base (18)..(18): 2'-fluorocytosine
  modified_base (19)..(19): um
  modified_base (20)..(20): 2'-fluorouracil
  modified_base (21)..(21): 2'-O-methyladenosine
gcaacuggauacuagaucuua

SEQ ID NO: 2075 - RNA, 21 nt, Artificial Sequence
  siRNA sense strand against APCS
  modified_base (1)..(1): 2'-fluorouracil
  modified_base (2)..(3): 5'-phosphonothioate
  modified_base (2)..(2): cm
  modified_base (3)..(3): 2'-fluorouracil
  modified_base (4)..(4): gm
  modified_base (5)..(5): 2'-fluorocytosine
  modified_base (6)..(6): 2'-O-methyladenosine
  modified_base (7)..(7): 2'-fluoroguanine
  modified_base (8)..(8): cm
  modified_base (9)..(9): 2'-fluorouracil
  modified_base (10)..(10): cm
  modified_base (11)..(12): 2'-fluorouracil
  modified_base (13)..(13): um
  modified_base (14)..(14): 2'-fluorocytosine
  modified_base (15)..(15): um
  modified_base (16)..(16): 2'-fluorouracil
  modified_base (17)..(17): cm
  modified_base (18)..(18): 2'-fluorouracil
  modified_base (19)..(19): um
  modified_base (20)..(20): 2'-fluorouracil
  modified_base (21)..(21): gm
ucugcagcucuuucuucuuug

SEQ ID NO: 2076 - RNA, 21 nt, Artificial Sequence
  siRNA sense strand against APCS
  modified_base (1)..(1): 2'-fluoroguanine
  modified_base (2)..(3): 5'-phosphonothioate
  modified_base (2)..(2): cm
  modified_base (3)..(3): 2'-fluoroadenine
  modified_base (4)..(4): gm
  modified_base (5)..(5): 2'-fluorocytosine
  modified_base (6)..(6): um
  modified_base (7)..(7): 2'-fluorocytosine
  modified_base (8)..(8): um
  modified_base (9)..(9): 2'-fluorouracil
  modified_base (10)..(10): um
  modified_base (11)..(11): 2'-fluorocytosine
  modified_base (12)..(12): 2'-fluorouracil
  modified_base (13)..(13): um
  modified_base (14)..(14): 2'-fluorocytosine
  modified_base (15)..(15): um
  modified_base (16)..(16): 2'-fluorouracil
  modified_base (17)..(17): um
  modified_base (18)..(18): 2'-fluoroguanine
  modified_base (19)..(19): 2'-O-methyladenosine
  modified_base (20)..(20): 2'-fluoroadenine
  modified_base (21)..(21): um
gcagcucuuucuucuuugaau

SEQ ID NO: 2077 - RNA, 21 nt, Artificial Sequence
  siRNA sense strand against APCS
  modified_base (1)..(1): 2'-fluorocytosine
  modified_base (2)..(3): 5'-phosphonothioate
  modified_base (2)..(2): 2'-O-methyladenosine
  modified_base (3)..(3): 2'-fluoroguanine
  modified_base (4)..(4): cm
  modified_base (5)..(5): 2'-fluorouracil
  modified_base (6)..(6): cm
  modified_base (7)..(7): 2'-fluorouracil
  modified_base (8)..(8): um
  modified_base (9)..(9): 2'-fluorouracil
  modified_base (10)..(10): cm
  modified_base (11)..(12): 2'-fluorouracil
  modified_base (13)..(13): cm
  modified_base (14)..(14): 2'-fluorouracil
  modified_base (15)..(15): um
  modified_base (16)..(16): 2'-fluorouracil
  modified_base (17)..(17): gm
  modified_base (18)..(18): 2'-fluoroadenine
  modified_base (19)..(19): 2'-O-methyladenosine
  modified_base (20)..(20): 2'-fluorouracil
  modified_base (21)..(21): um
cagcucuuucuucuuugaauu

SEQ ID NO: 2078 - RNA, 21 nt, Artificial Sequence
  siRNA sense strand against APCS
  modified_base (1)..(1): 2'-fluorouracil
  modified_base (2)..(3): 5'-phosphonothioate
  modified_base (2)..(2): um
  modified_base (3)..(3): 2'-fluoroguanine
  modified_base (4)..(4): 2'-O-methyladenosine
  modified_base (5)..(5): 2'-fluoroadenine
  modified_base (6)..(6): um
  modified_base (7)..(7): 2'-fluorouracil
  modified_base (8)..(8): um
  modified_base (9)..(9): 2'-fluorocytosine
  modified_base (10)..(10): cm
  modified_base (11)..(11): 2'-fluorouracil
  modified_base (12)..(12): 2'-fluoroadenine
  modified_base (13)..(13): um
  modified_base (14)..(14): 2'-fluorocytosine
  modified_base (15)..(15): um
  modified_base (16)..(16): 2'-fluoroguanine
  modified_base (17)..(17): um
  modified_base (18)..(18): 2'-fluoroadenine
  modified_base (19)..(19): um
  modified_base (20)..(20): 2'-fluoroguanine
  modified_base (21)..(21): um
uugaauuuccuaucuguaugu

SEQ ID NO: 2079 - RNA, 21 nt, Artificial Sequence
  siRNA sense strand against APCS
  modified_base (1)..(1): 2'-fluorouracil
  modified_base (2)..(3): 5'-phosphonothioate
  modified_base (2)..(2): 2'-O-methyladenosine
  modified_base (3)..(3): 2'-fluorocytosine
  modified_base (4)..(4): cm
  modified_base (5)..(5): 2'-fluorouracil
  modified_base (6)..(6): um
  modified_base (7)..(7): 2'-fluoroguanine
  modified_base (8)..(8): um
  modified_base (9)..(9): 2'-fluoroguanine
  modified_base (10)..(10): um
  modified_base (11)..(12): 2'-fluorouracil
  modified_base (13)..(13): um
  modified_base (14)..(14): 2'-fluorocytosine
  modified_base (15)..(15): gm
  modified_base (16)..(16): 2'-fluoroadenine
  modified_base (17)..(17): gm
  modified_base (18)..(18): 2'-fluorocytosine
  modified_base (19)..(19): cm
  modified_base (20)..(20): 2'-fluorouracil
  modified_base (21)..(21): 2'-O-methyladenosine
uaccuuguguuuucgagccua

SEQ ID NO: 2080 - RNA, 21 nt, Artificial Sequence
  siRNA sense strand against APCS
  modified_base (1)..(1): 2'-fluorocytosine
  modified_base (2)..(3): 5'-phosphonothioate
  modified_base (2)..(2): cm
  modified_base (3)..(3): 2'-fluoroadenine
  modified_base (4)..(4): gm
  modified_base (5)..(5): 2'-fluorouracil
  modified_base (6)..(6): cm
  modified_base (7)..(7): 2'-fluorocytosine
  modified_base (8)..(8): um
  modified_base (9)..(9): 2'-fluorouracil
  modified_base (10)..(10): um
  modified_base (11)..(11): 2'-fluoroguanine
  modified_base (12)..(12): 2'-fluorouracil
  modified_base (13)..(13): gm
  modified_base (14)..(14): 2'-fluoroguanine
  modified_base (15)..(15): gm
  modified_base (16)..(16): 2'-fluoroadenine
  modified_base (17)..(17): gm
  modified_base (18)..(18): 2'-fluoroadenine
  modified_base (19)..(19): gm
  modified_base (20)..(20): 2'-fluoroadenine
  modified_base (21)..(21): um
ccaguccuuugugggagagau

SEQ ID NO: 2081 - RNA, 21 nt, Artificial Sequence
  siRNA sense strand against APCS
  modified_base (1)..(1): 2'-fluoroguanine
  modified_base (2)..(3): 5'-phosphonothioate
  modified_base (2)..(2): 2'-O-methyladenosine
  modified_base (3)..(3): 2'-fluoroguanine
  modified_base (4)..(4): 2'-O-methyladenosine
  modified_base (5)..(5): 2'-fluoroguanine
  modified_base (6)..(6): 2'-O-methyladenosine
  modified_base (7)..(7): 2'-fluorouracil
  modified_base (8)..(8): um
  modified_base (9)..(9): 2'-fluoroguanine
  modified_base (10)..(10): gm
  modified_base (11)..(12): 2'-fluoroguanine
  modified_base (13)..(13): 2'-O-methyladenosine
  modified_base (14)..(14): 2'-fluorouracil
  modified_base (15)..(15): um
  modified_base (16)..(16): 2'-fluorouracil
  modified_base (17)..(17): gm
  modified_base (18)..(18): 2'-fluorouracil
  modified_base (19)..(19): 2'-O-methyladenosine
  modified_base (20)..(20): 2'-fluorocytosine
  modified_base (21)..(21): 2'-O-methyladenosine
gagagauuggggauuuguaca

SEQ ID NO: 2082 - RNA, 21 nt, Artificial Sequence
  siRNA sense strand against APCS
  modified_base (1)..(1): 2'-fluorouracil
  modified_base (2)..(3): 5'-phosphonothioate
  modified_base (2)..(2): gm
  modified_base (3)..(3): 2'-fluoroguanine
  modified_base (4)..(4): gm
  modified_base (5)..(5): 2'-fluorouracil
  modified_base (6)..(6): cm
  modified_base (7)..(7): 2'-fluorouracil
  modified_base (8)..(8): gm
  modified_base (9)..(9): 2'-fluoroadenine
  modified_base (10)..(10): gm
  modified_base (11)..(11): 2'-fluoroguanine
  modified_base (12)..(12): 2'-fluorouracil
  modified_base (13)..(13): cm
  modified_base (14)..(14): 2'-fluorouracil
  modified_base (15)..(15): um
  modified_base (16)..(16): 2'-fluoroguanine
  modified_base (17)..(17): 2'-O-methyladenosine
  modified_base (18)..(18): 2'-fluorocytosine
  modified_base (19)..(19): um
  modified_base (20)..(20): 2'-fluorocytosine
  modified_base (21)..(21): 2'-O-methyladenosine
ugggucugaggucuugacuca

SEQ ID NO: 2083 - RNA, 21 nt, Artificial Sequence
  siRNA sense strand against APCS
  modified_base (1)..(1): 2'-fluoroadenine
  modified_base (2)..(3): 5'-phosphonothioate
  modified_base (2)..(2): gm
  modified_base (3)..(3): 2'-fluoroadenine
  modified_base (4)..(4): gm
  modified_base (5)..(5): 2'-fluorocytosine
  modified_base (6)..(6): 2'-O-methyladenosine
  modified_base (7)..(7): 2'-fluorocytosine
  modified_base (8)..(8): um
  modified_base (9)..(9): 2'-fluorouracil
  modified_base (10)..(10): gm
  modified_base (11)..(12): 2'-fluoroadenine
  modified_base (13)..(13): 2'-O-methyladenosine
  modified_base (14)..(14): 2'-fluoroadenine
  modified_base (15)..(15): um
  modified_base (16)..(16): 2'-fluoroguanine
  modified_base (17)..(17): 2'-O-methyladenosine
  modified_base (18)..(18): 2'-fluoroadenine
  modified_base (19)..(19): 2'-O-methyladenosine
  modified_base (20)..(20): 2'-fluorouracil
  modified_base (21)..(21): gm
agagcacuugaaaaugaaaug

SEQ ID NO: 2084 - RNA, 21 nt, Artificial Sequence
  siRNA sense strand against APCS
  modified_base (1)..(1): 2'-fluoroguanine
  modified_base (2)..(3): 5'-phosphonothioate
  modified_base (2)..(2): cm
  modified_base (3)..(3): 2'-fluoroadenine
  modified_base (4)..(4): 2'-O-methyladenosine
  modified_base (5)..(5): 2'-fluorocytosine
  modified_base (6)..(6): um
  modified_base (7)..(7): 2'-fluoroguanine
  modified_base (8)..(8): gm
  modified_base (9)..(9): 2'-fluoroadenine
  modified_base (10)..(10): um
  modified_base (11)..(11): 2'-fluoroadenine
  modified_base (12)..(12): 2'-fluorocytosine
  modified_base (13)..(13): um
  modified_base (14)..(14): 2'-fluoroadenine
  modified_base (15)..(15): gm
  modified_base (16)..(16): 2'-fluoroadenine
  modified_base (17)..(17): um
  modified_base (18)..(18): 2'-fluorocytosine
  modified_base (19)..(19): um
  modified_base (20)..(20): 2'-fluorouracil
  modified_base (21)..(21): 2'-O-methyladenosine
gcaacuggauacuagaucuua

SEQ ID NO: 2085 - RNA, 21 nt, Artificial Sequence
  siRNA sense strand against APCS
  modified_base (1)..(1): 2'-fluorouracil
  modified_base (2)..(3): 5'-phosphonothioate
  modified_base (2)..(2): cm
  modified_base (3)..(3): 2'-fluorouracil
  modified_base (4)..(4): gm
  modified_base (5)..(5): 2'-fluorocytosine
  modified_base (6)..(6): 2'-O-methyladenosine
  modified_base (7)..(7): 2'-fluoroguanine
  modified_base (8)..(8): cm
  modified_base (9)..(9): 2'-fluorouracil
  modified_base (10)..(10): cm
  modified_base (11)..(12): 2'-fluorouracil
  modified_base (13)..(13): um
  modified_base (14)..(14): 2'-fluorocytosine
  modified_base (15)..(15): um
  modified_base (16)..(16): 2'-fluorouracil
  modified_base (17)..(17): cm
  modified_base (18)..(18): 2'-fluorouracil
  modified_base (19)..(19): um
  modified_base (20)..(20): 2'-fluorouracil
  modified_base (21)..(21): gm
ucugcagcucuuucuucuuug

SEQ ID NO: 2086 - RNA, 21 nt, Artificial Sequence
  siRNA sense strand against APCS
  modified_base (1)..(1): 2'-fluoroguanine
  modified_base (2)..(3): 5'-phosphonothioate
  modified_base (2)..(2): cm
  modified_base (3)..(3): 2'-fluoroadenine
  modified_base (4)..(4): gm
  modified_base (5)..(5): 2'-fluorocytosine
  modified_base (6)..(6): um
  modified_base (7)..(7): 2'-fluorocytosine
  modified_base (8)..(8): um
  modified_base (9)..(9): 2'-fluorouracil
  modified_base (10)..(10): um
  modified_base (11)..(11): 2'-fluorocytosine
  modified_base (12)..(12): 2'-fluorouracil
  modified_base (13)..(13): um
  modified_base (14)..(14): 2'-fluorocytosine
  modified_base (15)..(15): um
  modified_base (16)..(16): 2'-fluorouracil
  modified_base (17)..(17): um
  modified_base (18)..(18): 2'-fluoroguanine
  modified_base (19)..(19): 2'-O-methyladenosine
  modified_base (20)..(20): 2'-fluoroadenine
  modified_base (21)..(21): um
gcagcucuuucuucuuugaau

SEQ ID NO: 2087 - RNA, 21 nt, Artificial Sequence
  siRNA sense strand against APCS
  modified_base (1)..(1): 2'-fluorocytosine
  modified_base (2)..(3): 5'-phosphonothioate
  modified_base (2)..(2): 2'-O-methyladenosine
  modified_base (3)..(3): 2'-fluoroguanine
  modified_base (4)..(4): cm
  modified_base (5)..(5): 2'-fluorouracil
  modified_base (6)..(6): cm
  modified_base (7)..(7): 2'-fluorouracil
  modified_base (8)..(8): um
  modified_base (9)..(9): 2'-fluorouracil
  modified_base (10)..(10): cm
  modified_base (11)..(12): 2'-fluorouracil
  modified_base (13)..(13): cm
  modified_base (14)..(14): 2'-fluorouracil
  modified_base (15)..(15): um
  modified_base (16)..(16): 2'-fluorouracil
  modified_base (17)..(17): gm
  modified_base (18)..(18): 2'-fluoroadenine
  modified_base (19)..(19): 2'-O-methyladenosine
  modified_base (20)..(20): 2'-fluorouracil
  modified_base (21)..(21): um
cagcucuuucuucuuugaauu

SEQ ID NO: 2088 - RNA, 21 nt, Artificial Sequence
  siRNA sense strand against APCS
  modified_base (1)..(1): 2'-fluorouracil
  modified_base (2)..(3): 5'-phosphonothioate
  modified_base (2)..(2): um
  modified_base (3)..(3): 2'-fluoroguanine
  modified_base (4)..(4): 2'-O-methyladenosine
  modified_base (5)..(5): 2'-fluoroadenine
  modified_base (6)..(6): um
  modified_base (7)..(7): 2'-fluorouracil
  modified_base (8)..(8): um
  modified_base (9)..(9): 2'-fluorocytosine
  modified_base (10)..(10): cm
  modified_base (11)..(11): 2'-fluorouracil
  modified_base (12)..(12): 2'-fluoroadenine
  modified_base (13)..(13): um
  modified_base (14)..(14): 2'-fluorocytosine
  modified_base (15)..(15): um
  modified_base (16)..(16): 2'-fluoroguanine
  modified_base (17)..(17): um
  modified_base (18)..(18): 2'-fluoroadenine
  modified_base (19)..(19): um
  modified_base (20)..(20): 2'-fluoroguanine
  modified_base (21)..(21): um
uugaauuuccuaucuguaugu

SEQ ID NO: 2089 - RNA, 21 nt, Artificial Sequence
  siRNA sense strand against APCS
  modified_base (1)..(1): 2'-fluorouracil
  modified_base (2)..(3): 5'-phosphonothioate
  modified_base (2)..(2): 2'-O-methyladenosine
  modified_base (3)..(3): 2'-fluorocytosine
  modified_base (4)..(4): cm
  modified_base (5)..(5): 2'-fluorouracil
  modified_base (6)..(6): um
  modified_base (7)..(7): 2'-fluoroguanine
  modified_base (8)..(8): um
  modified_base (9)..(9): 2'-fluoroguanine
  modified_base (10)..(10): um
  modified_base (11)..(12): 2'-fluorouracil
  modified_base (13)..(13): um
  modified_base (14)..(14): 2'-fluorocytosine
  modified_base (15)..(15): gm
  modified_base (16)..(16): 2'-fluoroadenine
  modified_base (17)..(17): gm
  modified_base (18)..(18): 2'-fluorocytosine
  modified_base (19)..(19): cm
  modified_base (20)..(20): um
  modified_base (21)..(21): 2'-fluoroadenine
uaccuuguguuuucgagccua

SEQ ID NO: 2090 - RNA, 21 nt, Artificial Sequence
  siRNA sense strand against APCS
  modified_base (1)..(1): um
  modified_base (2)..(3): 5'-phosphonothioate
  modified_base (2)..(2): 2'-O-methyladenosine
  modified_base (3)..(4): cm
  modified_base (5)..(6): um
  modified_base (7)..(7): 2'-fluoroguanine
  modified_base (8)..(8): um
  modified_base (9)..(9): 2'-fluoroguanine
  modified_base (10)..(10): um
  modified_base (11)..(12): 2'-fluorouracil
  modified_base (13)..(13): um
  modified_base (14)..(14): cm
  modified_base (15)..(15): gm
  modified_base (16)..(16): 2'-O-methyladenosine
  modified_base (17)..(17): gm
  modified_base (18)..(19): cm
  modified_base (20)..(20): um
  modified_base (21)..(21): 2'-O-methyladenosine
uaccuuguguuuucgagccua

SEQ ID NO: 2091 - RNA, 21 nt, Artificial Sequence
  siRNA sense strand against APCS
  modified_base (1)..(1): um
  modified_base (2)..(3): 5'-phosphonothioate
  modified_base (2)..(2): 2'-O-methyladenosine
  modified_base (3)..(3): 2'-fluorocytosine
  modified_base (4)..(4): cm
  modified_base (5)..(5): 2'-fluorouracil
  modified_base (6)..(6): um
  modified_base (7)..(7): 2'-fluoroguanine
  modified_base (8)..(8): um
  modified_base (9)..(9): 2'-fluoroguanine
  modified_base (10)..(10): um
  modified_base (11)..(12): 2'-fluorouracil
  modified_base (13)..(13): um
  modified_base (14)..(14): 2'-fluorocytosine
  modified_base (15)..(15): gm
  modified_base (16)..(16): 2'-fluoroadenine
  modified_base (17)..(17): gm
  modified_base (18)..(19): cm
  modified_base (20)..(20): um
  modified_base (21)..(21): 2'-O-methyladenosine
uaccuuguguuuucgagccua

SEQ ID NO: 2092 - RNA, 21 nt, Artificial Sequence
  siRNA sense strand against APCS
  modified_base (1)..(1): um
  modified_base (2)..(3): 5'-phosphonothioate
  modified_base (2)..(4): gm
  modified_base (5)..(5): um
  modified_base (6)..(6): cm
  modified_base (7)..(7): 2'-fluorouracil
  modified_base (8)..(8): gm
  modified_base (9)..(9): 2'-fluoroadenine
  modified_base (10)..(10): gm
  modified_base (11)..(11): 2'-fluoroguanine
  modified_base (12)..(12): 2'-fluorouracil
  modified_base (13)..(13): cm
  modified_base (14)..(15): um
  modified_base (16)..(16): gm
  modified_base (17)..(17): 2'-O-methyladenosine
  modified_base (18)..(18): cm
  modified_base (19)..(19): um
  modified_base (20)..(20): cm
  modified_base (21)..(21): 2'-O-methyladenosine
ugggucugaggucuugacuca

SEQ ID NO: 2093 - RNA, 21 nt, Artificial Sequence
  siRNA sense strand against APCS
  modified_base (1)..(1): um
  modified_base (2)..(3): 5'-phosphonothioate
  modified_base (2)..(2): gm
  modified_base (3)..(3): 2'-fluoroguanine
  modified_base (4)..(4): gm
  modified_base (5)..(5): 2'-fluorouracil
  modified_base (6)..(6): cm
  modified_base (7)..(7): 2'-fluorouracil
  modified_base (8)..(8): gm
  modified_base (9)..(9): 2'-fluoroadenine
  modified_base (10)..(10): gm
  modified_base (11)..(11): 2'-fluoroguanine
  modified_base (12)..(12): 2'-fluorouracil
  modified_base (13)..(13): cm
  modified_base (14)..(14): 2'-fluorouracil
  modified_base (15)..(15): um
  modified_base (16)..(16): 2'-fluoroguanine
  modified_base (17)..(17): 2'-O-methyladenosine
  modified_base (18)..(18): cm
  modified_base (19)..(19): um
  modified_base (20)..(20): cm
  modified_base (21)..(21): 2'-O-methyladenosine
ugggucugaggucuugacuca

SEQ ID NO: 2094 - RNA, 21 nt, Artificial Sequence
  siRNA sense strand against APCS
  modified_base (1)..(1): 2'-fluoroadenine
  modified_base (2)..(3): 5'-phosphonothioate
  modified_base (2)..(2): gm
  modified_base (3)..(3): 2'-fluoroadenine
  modified_base (4)..(4): gm
  modified_base (5)..(5): 2'-fluorocytosine
  modified_base (6)..(6): 2'-O-methyladenosine
  modified_base (7)..(7): 2'-fluorocytosine
  modified_base (8)..(8): um
  modified_base (9)..(9): 2'-fluorouracil
  modified_base (10)..(10): gm
  modified_base (11)..(12): 2'-fluoroadenine
  modified_base (13)..(13): 2'-O-methyladenosine
  modified_base (14)..(14): 2'-fluoroadenine
  modified_base (15)..(15): um
  modified_base (16)..(16): 2'-fluoroguanine
  modified_base (17)..(17): 2'-O-methyladenosine
  modified_base (18)..(18): 2'-fluoroadenine
  modified_base (19)..(19): 2'-O-methyladenosine
  modified_base (20)..(20): um
  modified_base (21)..(21): 2'-fluoroguanine
agagcacuugaaaaugaaaug

SEQ ID NO: 2095 - RNA, 21 nt, Artificial Sequence
  siRNA sense strand against APCS
  modified_base (1)..(1): 2'-O-methyladenosine
  modified_base (2)..(3): 5'-phosphonothioate
  modified_base (2)..(2): gm
  modified_base (3)..(3): 2'-O-methyladenosine
  modified_base (4)..(4): gm
  modified_base (5)..(5): cm
  modified_base (6)..(6): 2'-O-methyladenosine
  modified_base (7)..(7): 2'-fluorocytosine
  modified_base (8)..(8): um
  modified_base (9)..(9): 2'-fluorouracil
  modified_base (10)..(10): gm
  modified_base (11)..(12): 2'-fluoroadenine
  modified_base (13)..(14): 2'-O-methyladenosine
  modified_base (15)..(15): um
  modified_base (16)..(16): gm
  modified_base (17)..(19): 2'-O-methyladenosine
  modified_base (20)..(20): um
  modified_base (21)..(21): gm
agagcacuugaaaaugaaaug

SEQ ID NO: 2096 - RNA, 21 nt, Artificial Sequence
  siRNA sense strand against APCS
  modified_base (1)..(1): 2'-O-methyladenosine
  modified_base (2)..(3): 5'-phosphonothioate
  modified_base (2)..(2): gm
  modified_base (3)..(3): 2'-fluoroadenine
  modified_base (4)..(4): gm
  modified_base (5)..(5): 2'-fluorocytosine
  modified_base (6)..(6): 2'-O-methyladenosine
  modified_base (7)..(7): 2'-fluorocytosine
  modified_base (8)..(8): um
  modified_base (9)..(9): 2'-fluorouracil
  modified_base (10)..(10): gm
  modified_base (11)..(12): 2'-fluoroadenine
  modified_base (13)..(13): 2'-O-methyladenosine
  modified_base (14)..(14): 2'-fluoroadenine
  modified_base (15)..(15): um
  modified_base (16)..(16): 2'-fluoroguanine
  modified_base (17)..(19): 2'-O-methyladenosine
  modified_base (20)..(20): um
  modified_base (21)..(21): gm
agagcacuugaaaaugaaaug

SEQ ID NO: 2097 - RNA, 21 nt, Artificial Sequence
  siRNA sense strand against APCS
  modified_base (1)..(1): 2'-fluorouracil
  modified_base (2)..(3): 5'-phosphonothioate
  modified_base (2)..(2): cm
  modified_base (3)..(3): 2'-fluorouracil
  modified_base (4)..(4): gm
  modified_base (5)..(5): 2'-fluorocytosine
  modified_base (6)..(6): 2'-O-methyladenosine
  modified_base (7)..(7): 2'-fluoroguanine
  modified_base (8)..(8): cm
  modified_base (9)..(9): 2'-fluorouracil
  modified_base (10)..(10): cm
  modified_base (11)..(12): 2'-fluorouracil
  modified_base (13)..(13): um
  modified_base (14)..(14): 2'-fluorocytosine
  modified_base (15)..(15): um
  modified_base (16)..(16): 2'-fluorouracil
  modified_base (17)..(17): cm
  modified_base (18)..(18): 2'-fluorouracil
  modified_base (19)..(20): um
  modified_base (21)..(21): 2'-fluoroguanine
ucugcagcucuuucuucuuug

SEQ ID NO: 2098 - RNA, 21 nt, Artificial Sequence
  siRNA sense strand against APCS
  modified_base (1)..(1): um
  modified_base (2)..(3): 5'-phosphonothioate
  modified_base (2)..(2): cm
  modified_base (3)..(3): um
  modified_base (4)..(4): gm
  modified_base (5)..(5): cm
  modified_base (6)..(6): 2'-O-methyladenosine
  modified_base (7)..(7): 2'-fluoroguanine
  modified_base (8)..(8): cm
  modified_base (9)..(9): 2'-fluorouracil
  modified_base (10)..(10): cm
  modified_base (11)..(12): 2'-fluorouracil
  modified_base (13)..(13): um
  modified_base (14)..(14): cm
  modified_base (15)..(16): um
  modified_base (17)..(17): cm
  modified_base (18)..(20): um
  modified_base (21)..(21): gm
ucugcagcucuuucuucuuug

SEQ ID NO: 2099 - RNA, 21 nt, Artificial Sequence
  siRNA sense strand against APCS
  modified_base (1)..(1): um
  modified_base (2)..(3): 5'-phosphonothioate
  modified_base (2)..(2): cm
  modified_base (3)..(3): 2'-fluorouracil
  modified_base (4)..(4): gm
  modified_base (5)..(5): 2'-fluorocytosine
  modified_base (6)..(6): 2'-O-methyladenosine
  modified_base (7)..(7): 2'-fluoroguanine
  modified_base (8)..(8): cm
  modified_base (9)..(9): 2'-fluorouracil
  modified_base (10)..(10): cm
  modified_base (11)..(12): 2'-fluorouracil
  modified_base (13)..(13): um
  modified_base (14)..(14): 2'-fluorocytosine
  modified_base (15)..(15): um
  modified_base (16)..(16): 2'-fluorouracil
  modified_base (17)..(17): cm
  modified_base (18)..(20): um
  modified_base (21)..(21): gm
ucugcagcucuuucuucuuug

SEQ ID NO: 2100 - RNA, 21 nt, Artificial Sequence
  siRNA sense strand against APCS
  modified_base (1)..(1): gm
  modified_base (2)..(3): 5'-phosphonothioate
  modified_base (2)..(2): cm
  modified_base (3)..(3): 2'-O-methyladenosine
  modified_base (4)..(4): gm
  modified_base (5)..(5): cm
  modified_base (6)..(6): um
  modified_base (7)..(7): 2'-fluorocytosine
  modified_base (8)..(8): um
  modified_base (9)..(9): 2'-fluorouracil
  modified_base (10)..(10): um
  modified_base (11)..(11): 2'-fluorocytosine
  modified_base (12)..(12): 2'-fluorouracil
  modified_base (13)..(13): um
  modified_base (14)..(14): cm
  modified_base (15)..(17): um
  modified_base (18)..(18): gm
  modified_base (19)..(20): 2'-O-methyladenosine
  modified_base (21)..(21): um
gcagcucuuucuucuuugaau

SEQ ID NO: 2101 - RNA, 21 nt, Artificial Sequence
  siRNA sense strand against APCS
  modified_base (1)..(1): gm
  modified_base (2)..(3): 5'-phosphonothioate
  modified_base (2)..(2): cm
  modified_base (3)..(3): 2'-fluoroadenine
  modified_base (4)..(4): gm
  modified_base (5)..(5): 2'-fluorocytosine
  modified_base (6)..(6): um
  modified_base (7)..(7): 2'-fluorocytosine
  modified_base (8)..(8): um
  modified_base (9)..(9): 2'-fluorouracil
  modified_base (10)..(10): um
  modified_base (11)..(11): 2'-fluorocytosine
  modified_base (12)..(12): 2'-fluorouracil
  modified_base (13)..(13): um
  modified_base (14)..(14): 2'-fluorocytosine
  modified_base (15)..(15): um
  modified_base (16)..(16): 2'-fluorouracil
  modified_base (17)..(17): um
  modified_base (18)..(18): gm
  modified_base (19)..(20): 2'-O-methyladenosine
  modified_base (21)..(21): um
gcagcucuuucuucuuugaau

SEQ ID NO: 2102 - RNA, 21 nt, Artificial Sequence
  siRNA sense strand against APCS
  modified_base (1)..(1): cm
  modified_base (2)..(3): 5'-phosphonothioate
  modified_base (2)..(2): 2'-O-methyladenosine
  modified_base (3)..(3): gm
  modified_base (4)..(4): cm
  modified_base (5)..(5): um
  modified_base (6)..(6): cm
  modified_base (7)..(7): 2'-fluorouracil
  modified_base (8)..(8): um
  modified_base (9)..(9): 2'-fluorouracil
  modified_base (10)..(10): cm
  modified_base (11)..(12): 2'-fluorouracil
  modified_base (13)..(13): cm
  modified_base (14)..(16): um
  modified_base (17)..(17): gm
  modified_base (18)..(19): 2'-O-methyladenosine
  modified_base (20)..(21): um
cagcucuuucuucuuugaauu

SEQ ID NO: 2103 - RNA, 21 nt, Artificial Sequence
  siRNA sense strand against APCS
  modified_base (1)..(1): cm
  modified_base (2)..(3): 5'-phosphonothioate
  modified_base (2)..(2): 2'-O-methyladenosine
  modified_base (3)..(3): 2'-fluoroguanine
  modified_base (4)..(4): cm
  modified_base (5)..(5): 2'-fluorouracil
  modified_base (6)..(6): cm
  modified_base (7)..(7): 2'-fluorouracil
  modified_base (8)..(8): um
  modified_base (9)..(9): 2'-fluorouracil
  modified_base (10)..(10): cm
  modified_base (11)..(12): 2'-fluorouracil
  modified_base (13)..(13): cm
  modified_base (14)..(14): 2'-fluorouracil
  modified_base (15)..(15): um
  modified_base (16)..(16): 2'-fluorouracil
  modified_base (17)..(17): gm
  modified_base (18)..(19): 2'-O-methyladenosine
  modified_base (20)..(21): um
cagcucuuucuucuuugaauu

SEQ ID NO: 2104 - RNA, 21 nt, Artificial Sequence
  siRNA sense strand against APCS
  modified_base (1)..(2): um
  modified_base (2)..(3): 5'-phosphonothioate
  modified_base (3)..(3): gm
  modified_base (4)..(5): 2'-O-methyladenosine
  modified_base (6)..(6): um
  modified_base (7)..(7): 2'-fluorouracil
  modified_base (8)..(8): um
  modified_base (9)..(9): 2'-fluorocytosine
  modified_base (10)..(10): cm
  modified_base (11)..(11): 2'-fluorouracil
  modified_base (12)..(12): 2'-fluoroadenine
  modified_base (13)..(13): um
  modified_base (14)..(14): cm
  modified_base (15)..(15): um
  modified_base (16)..(16): gm
  modified_base (17)..(17): um
  modified_base (18)..(18): 2'-O-methyladenosine
  modified_base (19)..(19): um
  modified_base (20)..(20): gm
  modified_base (21)..(21): um
uugaauuuccuaucuguaugu

SEQ ID NO: 2105 - RNA, 21 nt, Artificial Sequence
  siRNA sense strand against APCS
  modified_base (1)..(2): um
  modified_base (2)..(3): 5'-phosphonothioate
  modified_base (3)..(3): 2'-fluoroguanine
  modified_base (4)..(4): 2'-O-methyladenosine
  modified_base (5)..(5): 2'-fluoroadenine
  modified_base (6)..(6): um
  modified_base (7)..(7): 2'-fluorouracil
  modified_base (8)..(8): um
  modified_base (9)..(9): 2'-fluorocytosine
  modified_base (10)..(10): cm
  modified_base (11)..(11): 2'-fluorouracil
  modified_base (12)..(12): 2'-fluoroadenine
  modified_base (13)..(13): um
  modified_base (14)..(14): 2'-fluorocytosine
  modified_base (15)..(15): um
  modified_base (16)..(16): 2'-fluoroguanine
  modified_base (17)..(17): um
  modified_base (18)..(18): 2'-O-methyladenosine
  modified_base (19)..(19): um
  modified_base (20)..(20): gm
  modified_base (21)..(21): um
uugaauuuccuaucuguaugu

SEQ ID NO: 2106 - RNA, 21 nt, Artificial Sequence
  siRNA sense strand against APCS
  modified_base (1)..(1): 2'-fluoroadenine
  modified_base (2)..(3): 5'-phosphonothioate
  modified_base (2)..(2): gm
  modified_base (3)..(3): 2'-fluoroadenine
  modified_base (4)..(4): gm
  modified_base (5)..(5): 2'-fluorocytosine
  modified_base (6)..(6): 2'-O-methyladenosine
  modified_base (7)..(7): 2'-fluorocytosine
  modified_base (8)..(8): um
  modified_base (9)..(9): 2'-fluorouracil
  modified_base (10)..(10): gm
  modified_base (11)..(12): 2'-fluoroadenine
  modified_base (13)..(13): 2'-O-methyladenosine
  modified_base (14)..(14): 2'-fluoroadenine
  modified_base (15)..(15): um
  modified_base (16)..(16): 2'-fluoroguanine
  modified_base (17)..(17): 2'-O-methyladenosine
  modified_base (18)..(18): 2'-fluoroadenine
  modified_base (19)..(19): 2'-O-methyladenosine
  modified_base (20)..(20): 2'-fluorouracil
  modified_base (21)..(21): 2'-O-methyladenosine
agagcacuugaaaaugaaaua

SEQ ID NO: 2107 - RNA, 21 nt, Artificial Sequence
  siRNA sense strand against APCS
  modified_base (1)..(1): 2'-O-methyladenosine
  modified_base (2)..(3): 5'-phosphonothioate
  modified_base (2)..(2): gm
  modified_base (3)..(3): 2'-O-methyladenosine
  modified_base (4)..(4): gm
  modified_base (5)..(5): cm
  modified_base (6)..(6): 2'-O-methyladenosine
  modified_base (7)..(7): 2'-fluorocytosine
  modified_base (8)..(8): um
  modified_base (9)..(9): 2'-fluorouracil
  modified_base (10)..(10): gm
  modified_base (11)..(12): 2'-fluoroadenine
  modified_base (13)..(14): 2'-O-methyladenosine
  modified_base (15)..(15): um
  modified_base (16)..(16): gm
  modified_base (17)..(19): 2'-O-methyladenosine
  modified_base (20)..(20): um
  modified_base (21)..(21): 2'-O-methyladenosine
agagcacuugaaaaugaaaua

SEQ ID NO: 2108 - RNA, 21 nt, Artificial Sequence
  siRNA sense strand against APCS
  modified_base (1)..(1): 2'-O-methyladenosine
  modified_base (2)..(3): 5'-phosphonothioate
  modified_base (2)..(2): gm
  modified_base (3)..(3): 2'-fluoroadenine
  modified_base (4)..(4): gm
  modified_base (5)..(5): 2'-fluorocytosine
  modified_base (6)..(6): 2'-O-methyladenosine
  modified_base (7)..(7): 2'-fluorocytosine
  modified_base (8)..(8): um
  modified_base (9)..(9): 2'-fluorouracil
  modified_base (10)..(10): gm
  modified_base (11)..(12): 2'-fluoroadenine
  modified_base (13)..(13): 2'-O-methyladenosine
  modified_base (14)..(14): 2'-fluoroadenine
  modified_base (15)..(15): um
  modified_base (16)..(16): 2'-fluoroguanine
  modified_base (17)..(19): 2'-O-methyladenosine
  modified_base (20)..(20): um
  modified_base (21)..(21): 2'-O-methyladenosine
agagcacuugaaaaugaaaua

SEQ ID NO: 2109 - RNA, 21 nt, Artificial Sequence
  siRNA sense strand against APCS
  modified_base (1)..(1): 2'-fluorouracil
  modified_base (2)..(3): 5'-phosphonothioate
  modified_base (2)..(2): cm
  modified_base (3)..(3): 2'-fluorouracil
  modified_base (4)..(4): gm
  modified_base (5)..(5): 2'-fluorocytosine
  modified_base (6)..(6): 2'-O-methyladenosine
  modified_base (7)..(7): 2'-fluoroguanine
  modified_base (8)..(8): cm
  modified_base (9)..(9): 2'-fluorouracil
  modified_base (10)..(10): cm
  modified_base (11)..(12): 2'-fluorouracil
  modified_base (13)..(13): um
  modified_base (14)..(14): 2'-fluorocytosine
  modified_base (15)..(15): um
  modified_base (16)..(16): 2'-fluorouracil
  modified_base (17)..(17): cm
  modified_base (18)..(18): 2'-fluorouracil
  modified_base (19)..(19): um
  modified_base (20)..(20): 2'-fluorouracil
  modified_base (21)..(21): 2'-O-methyladenosine
ucugcagcucuuucuucuuua

SEQ ID NO: 2110 - RNA, 21 nt, Artificial Sequence
  siRNA sense strand against APCS
  modified_base (1)..(1): um
  modified_base (2)..(3): 5'-phosphonothioate
  modified_base (2)..(2): cm
  modified_base (3)..(3): um
  modified_base (4)..(4): gm
  modified_base (5)..(5): cm
  modified_base (6)..(6): 2'-O-methyladenosine
  modified_base (7)..(7): 2'-fluoroguanine
  modified_base (8)..(8): cm
  modified_base (9)..(9): 2'-fluorouracil
  modified_base (10)..(10): cm
  modified_base (11)..(12): 2'-fluorouracil
  modified_base (13)..(13): um
  modified_base (14)..(14): cm
  modified_base (15)..(16): um
  modified_base (17)..(17): cm
  modified_base (18)..(20): um
  modified_base (21)..(21): 2'-O-methyladenosine
ucugcagcucuuucuucuuua

SEQ ID NO: 2111 - RNA, 21 nt, Artificial Sequence
  siRNA sense strand against APCS
  modified_base (1)..(1): um
  modified_base (2)..(3): 5'-phosphonothioate
  modified_base (2)..(2): cm
  modified_base (3)..(3): 2'-fluorouracil
  modified_base (4)..(4): gm
  modified_base (5)..(5): 2'-fluorocytosine
  modified_base (6)..(6): 2'-O-methyladenosine
  modified_base (7)..(7): 2'-fluoroguanine
  modified_base (8)..(8): cm
  modified_base (9)..(9): 2'-fluorouracil
  modified_base (10)..(10): cm
  modified_base (11)..(12): 2'-fluorouracil
  modified_base (13)..(13): um
  modified_base (14)..(14): 2'-fluorocytosine
  modified_base (15)..(15): um
  modified_base (16)..(16): 2'-fluorouracil
  modified_base (17)..(17): cm
  modified_base (18)..(20): um
  modified_base (21)..(21): 2'-O-methyladenosine
ucugcagcucuuucuucuuua

SEQ ID NO: 2112 - RNA, 23 nt, Artificial Sequence
  siRNA antisense strand against APCS
  modified_base (1)..(3): 5'-phosphonothioate
  modified_base (1)..(1): 2'-fluorouracil
  modified_base (2)..(2): 2'-O-methyladenosine
  modified_base (3)..(3): 2'-fluoroguanine
  modified_base (4)..(4): gm
  modified_base (5)..(5): 2'-fluorocytosine
  modified_base (6)..(6): um
  modified_base (7)..(7): 2'-fluorocytosine
  modified_base (8)..(8): gm
  modified_base (9)..(9): 2'-fluoroadenine
  modified_base (10)..(11): 2'-O-methyladenosine
  modified_base (12)..(12): 2'-fluoroadenine
  modified_base (13)..(13): cm
  modified_base (14)..(14): 2'-fluoroadenine
  modified_base (15)..(15): cm
  modified_base (16)..(16): 2'-fluoroadenine
  modified_base (17)..(17): 2'-O-methyladenosine
  modified_base (18)..(18): 2'-fluoroguanine
  modified_base (19)..(19): gm
  modified_base (20)..(20): 2'-fluorouracil
  modified_base (21)..(21): 2'-O-methyladenosine
  modified_base (22)..(23): 5'-phosphonothioate
  modified_base (22)..(22): 2'-fluoroadenine
  modified_base (23)..(23): 2'-O-methyladenosine
uaggcucgaaaacacaagguaaa

SEQ ID NO: 2113 - RNA, 23 nt, Artificial Sequence
  siRNA antisense strand against APCS
  modified_base (1)..(3): 5'-phosphonothioate
  modified_base (1)..(1): 2'-fluoroadenine
  modified_base (2)..(2): um
  modified_base (3)..(3): 2'-fluorocytosine
  modified_base (4)..(4): um
  modified_base (5)..(5): 2'-fluorocytosine
  modified_base (6)..(6): um
  modified_base (7)..(7): 2'-fluorocytosine
  modified_base (8)..(8): cm
  modified_base (9)..(9): 2'-fluorocytosine
  modified_base (10)..(10): 2'-O-methyladenosine
  modified_base (11)..(11): cm
  modified_base (12)..(12): 2'-fluoroadenine
  modified_base (13)..(13): 2'-O-methyladenosine
  modified_base (14)..(14): 2'-fluoroadenine
  modified_base (15)..(15): gm
  modified_base (16)..(16): 2'-fluoroguanine
  modified_base (17)..(17): 2'-O-methyladenosine
  modified_base (18)..(18): 2'-fluorocytosine
  modified_base (19)..(19): um
  modified_base (20)..(20): 2'-fluoroguanine
  modified_base (21)..(21): gm
  modified_base (22)..(23): 5'-phosphonothioate
  modified_base (22)..(22): 2'-fluorocytosine
  modified_base (23)..(23): um
aucucucccacaaaggacuggcu

SEQ ID NO: 2114 - RNA, 23 nt, Artificial Sequence
  siRNA antisense strand against APCS
  modified_base (1)..(3): 5'-phosphonothioate
  modified_base (1)..(1): 2'-fluorouracil
  modified_base (2)..(2): gm
  modified_base (3)..(3): 2'-fluorouracil
  modified_base (4)..(4): 2'-O-methyladenosine
  modified_base (5)..(5): 2'-fluorocytosine
  modified_base (6)..(6): 2'-O-methyladenosine
  modified_base (7)..(7): 2'-fluoroadenine
  modified_base (8)..(8): 2'-O-methyladenosine
  modified_base (9)..(9): 2'-fluorouracil
  modified_base (10)..(11): cm
  modified_base (12)..(12): 2'-fluorocytosine
  modified_base (13)..(13): cm
  modified_base (14)..(14): 2'-fluoroadenine
  modified_base (15)..(15): 2'-O-methyladenosine
  modified_base (16)..(16): 2'-fluorouracil
  modified_base (17)..(17): cm
  modified_base (18)..(18): 2'-fluorouracil
  modified_base (19)..(19): cm
  modified_base (20)..(20): 2'-fluorouracil
  modified_base (21)..(21): cm
  modified_base (22)..(23): 5'-phosphonothioate
  modified_base (22)..(22): 2'-fluorocytosine
  modified_base (23)..(23): cm
uguacaaauccccaaucucuccc

SEQ ID NO: 2115 - RNA, 23 nt, Artificial Sequence
  siRNA antisense strand against APCS
  modified_base (1)..(3): 5'-phosphonothioate
  modified_base (1)..(1): 2'-fluorouracil
  modified_base (2)..(2): gm
  modified_base (3)..(3): 2'-fluoroadenine
  modified_base (4)..(4): gm
  modified_base (5)..(5): 2'-fluorouracil
  modified_base (6)..(6): cm
  modified_base (7)..(7): 2'-fluoroadenine
  modified_base (8)..(8): 2'-O-methyladenosine
  modified_base (9)..(9): 2'-fluoroguanine
  modified_base (10)..(10): 2'-O-methyladenosine
  modified_base (11)..(11): cm
  modified_base (12)..(12): 2'-fluorocytosine
  modified_base (13)..(13): um
  modified_base (14)..(14): 2'-fluorocytosine
  modified_base (15)..(15): 2'-O-methyladenosine
  modified_base (16)..(16): 2'-fluoroguanine
  modified_base (17)..(17): 2'-O-methyladenosine
  modified_base (18)..(18): 2'-fluorocytosine
  modified_base (19)..(19): cm
  modified_base (20)..(20): 2'-fluorocytosine
  modified_base (21)..(21): 2'-O-methyladenosine
  modified_base (22)..(23): 5'-phosphonothioate
  modified_base (22)..(22): 2'-fluorocytosine
  modified_base (23)..(23): 2'-O-methyladenosine
ugagucaagaccucagacccaca

SEQ ID NO: 2116 - RNA, 23 nt, Artificial Sequence
  siRNA antisense strand against APCS
  modified_base (1)..(3): 5'-phosphonothioate
  modified_base (1)..(1): 2'-fluorocytosine
  modified_base (2)..(2): 2'-O-methyladenosine
  modified_base (3)..(3): 2'-fluorouracil
  modified_base (4)..(4): um
  modified_base (5)..(5): 2'-fluorouracil
  modified_base (6)..(6): cm
  modified_base (7)..(7): 2'-fluoroadenine
  modified_base (8)..(8): um
  modified_base (9)..(9): 2'-fluorouracil
  modified_base (10)..(11): um
  modified_base (12)..(12): 2'-fluorocytosine
  modified_base (13)..(13): 2'-O-methyladenosine
  modified_base (14)..(14): 2'-fluoroadenine
  modified_base (15)..(15): gm
  modified_base (16)..(16): 2'-fluorouracil
  modified_base (17)..(17): gm
  modified_base (18)..(18): 2'-fluorocytosine
  modified_base (19)..(19): um
  modified_base (20)..(20): 2'-fluorocytosine
  modified_base (21)..(21): um
  modified_base (22)..(23): 5'-phosphonothioate
  modified_base (22)..(22): 2'-fluorocytosine
  modified_base (23)..(23): gm
cauuucauuuucaagugcucucg

SEQ ID NO: 2117 - RNA, 23 nt, Artificial Sequence
  siRNA antisense strand against APCS
  modified_base (1)..(3): 5'-phosphonothioate
  modified_base (1)..(1): 2'-fluorouracil
  modified_base (2)..(2): 2'-O-methyladenosine
  modified_base (3)..(3): 2'-fluoroadenine
  modified_base (4)..(4): gm
  modified_base (5)..(5): 2'-fluoroadenine
  modified_base (6)..(6): um
  modified_base (7)..(7): 2'-fluorocytosine
  modified_base (8)..(8): um
  modified_base (9)..(9): 2'-fluoroadenine
  modified_base (10)..(10): gm
  modified_base (11)..(11): um
  modified_base (12)..(12): 2'-fluoroadenine
  modified_base (13)..(13): um
  modified_base (14)..(14): 2'-fluorocytosine
  modified_base (15)..(15): cm
  modified_base (16)..(16): 2'-fluoroadenine
  modified_base (17)..(17): gm
  modified_base (18)..(18): 2'-fluorouracil
  modified_base (19)..(19): um
  modified_base (20)..(20): 2'-fluoroguanine
  modified_base (21)..(21): cm
  modified_base (22)..(23): 5'-phosphonothioate
  modified_base (22)..(22): 2'-fluorouracil
  modified_base (23)..(23): um
uaagaucuaguauccaguugcuu

SEQ ID NO: 2118 - RNA, 23 nt, Artificial Sequence
  siRNA antisense strand against APCS
  modified_base (1)..(3): 5'-phosphonothioate
  modified_base (1)..(1): 2'-fluorocytosine
  modified_base (2)..(2): 2'-O-methyladenosine
  modified_base (3)..(3): 2'-fluoroadenine
  modified_base (4)..(4): 2'-O-methyladenosine
  modified_base (5)..(5): 2'-fluoroguanine
  modified_base (6)..(6): 2'-O-methyladenosine
  modified_base (7)..(7): 2'-fluoroadenine
  modified_base (8)..(8): gm
  modified_base (9)..(9): 2'-fluoroadenine
  modified_base (10)..(11): 2'-O-methyladenosine
  modified_base (12)..(12): 2'-fluoroguanine
  modified_base (13)..(13): 2'-O-methyladenosine
  modified_base (14)..(14): 2'-fluoroguanine
  modified_base (15)..(15): cm
  modified_base (16)..(16): 2'-fluorouracil
  modified_base (17)..(17): gm
  modified_base (18)..(18): 2'-fluorocytosine
  modified_base (19)..(19): 2'-O-methyladenosine
  modified_base (20)..(20): 2'-fluoroguanine
  modified_base (21)..(21): 2'-O-methyladenosine
  modified_base (22)..(23): 5'-phosphonothioate
  modified_base (22)..(22): 2'-fluorouracil
  modified_base (23)..(23): gm
caaagaagaaagagcugcagaug

SEQ ID NO: 2119 - RNA, 23 nt, Artificial Sequence
  siRNA antisense strand against APCS
  modified_base (1)..(3): 5'-phosphonothioate
  modified_base (1)..(1): 2'-fluoroadenine
  modified_base (2)..(2): um
  modified_base (3)..(3): 2'-fluorouracil
  modified_base (4)..(4): cm
  modified_base (5)..(5): 2'-fluoroadenine
  modified_base (6)..(6): 2'-O-methyladenosine
  modified_base (7)..(7): 2'-fluoroadenine
  modified_base (8)..(8): gm
  modified_base (9)..(9): 2'-fluoroadenine
  modified_base (10)..(10): 2'-O-methyladenosine
  modified_base (11)..(11): gm
  modified_base (12)..(12): 2'-fluoroadenine
  modified_base (13)..(13): 2'-O-methyladenosine
  modified_base (14)..(14): 2'-fluoroadenine
  modified_base (15)..(15): gm
  modified_base (16)..(16): 2'-fluoroadenine
  modified_base (17)..(17): gm
  modified_base (18)..(18): 2'-fluorocytosine
  modified_base (19)..(19): um
  modified_base (20)..(20): 2'-fluoroguanine
  modified_base (21)..(21): cm
  modified_base (22)..(23): 5'-phosphonothioate
  modified_base (22)..(22): 2'-fluoroadenine
  modified_base (23)..(23): gm
auucaaagaagaaagagcugcag

SEQ ID NO: 2120 - RNA, 23 nt, Artificial Sequence
  siRNA antisense strand against APCS
  modified_base (1)..(3): 5'-phosphonothioate
  modified_base (1)..(1): 2'-fluoroadenine
  modified_base (2)..(2): 2'-O-methyladenosine
  modified_base (3)..(3): 2'-fluorouracil
  modified_base (4)..(4): um
  modified_base (5)..(5): 2'-fluorocytosine
  modified_base (6)..(6): 2'-O-methyladenosine
  modified_base (7)..(7): 2'-fluoroadenine
  modified_base (8)..(8): 2'-O-methyladenosine
  modified_base (9)..(9): 2'-fluoroguanine
  modified_base (10)..(11): 2'-O-methyladenosine
  modified_base (12)..(12): 2'-fluoroguanine
  modified_base (13)..(13): 2'-O-methyladenosine
  modified_base (14)..(14): 2'-fluoroadenine
  modified_base (15)..(15): 2'-O-methyladenosine
  modified_base (16)..(16): 2'-fluoroguanine
  modified_base (17)..(17): 2'-O-methyladenosine
  modified_base (18)..(18): 2'-fluoroguanine
  modified_base (19)..(19): cm
  modified_base (20)..(20): 2'-fluorouracil
  modified_base (21)..(21): gm
  modified_base (22)..(23): 5'-phosphonothioate
  modified_base (22)..(22): 2'-fluorocytosine
  modified_base (23)..(23): 2'-O-methyladenosine
aauucaaagaagaaagagcugca

SEQ ID NO: 2121 - RNA, 23 nt, Artificial Sequence
  siRNA antisense strand against APCS
  modified_base (1)..(3): 5'-phosphonothioate
  modified_base (1)..(1): 2'-fluoroadenine
  modified_base (2)..(2): cm
  modified_base (3)..(3): 2'-fluoroadenine
  modified_base (4)..(4): um
  modified_base (5)..(5): 2'-fluoroadenine
  modified_base (6)..(6): cm
  modified_base (7)..(7): 2'-fluoroadenine
  modified_base (8)..(8): gm
  modified_base (9)..(9): 2'-fluoroadenine
  modified_base (10)..(10): um
  modified_base (11)..(11): 2'-O-methyladenosine
  modified_base (12)..(12): 2'-fluoroguanine
  modified_base (13)..(13): gm
  modified_base (14)..(14): 2'-fluoroadenine
  modified_base (15)..(15): 2'-O-methyladenosine
  modified_base (16)..(16): 2'-fluoroadenine
  modified_base (17)..(17): um
  modified_base (18)..(18): 2'-fluorouracil
  modified_base (19)..(19): cm
  modified_base (20)..(20): 2'-fluoroadenine
  modified_base (21)..(21): 2'-O-methyladenosine
  modified_base (22)..(23): 5'-phosphonothioate
  modified_base (22)..(22): 2'-fluoroadenine
  modified_base (23)..(23): gm
acauacagauaggaaauucaaag

SEQ ID NO: 2122 - RNA, 23 nt, Artificial Sequence
  siRNA antisense strand against APCS
  modified_base (1)..(3): 5'-phosphonothioate
  modified_base (1)..(1): 2'-fluorouracil
  modified_base (2)..(2): 2'-O-methyladenosine
  modified_base (3)..(3): 2'-fluoroguanine
  modified_base (4)..(4): gm
  modified_base (5)..(5): 2'-fluorocytosine
  modified_base (6)..(6): um
  modified_base (7)..(7): 2'-fluorocytosine
  modified_base (8)..(8): gm
  modified_base (9)..(9): 2'-fluoroadenine
  modified_base (10)..(11): 2'-O-methyladenosine
  modified_base (12)..(12): 2'-fluoroadenine
  modified_base (13)..(13): cm
  modified_base (14)..(14): 2'-fluoroadenine
  modified_base (15)..(15): cm
  modified_base (16)..(16): 2'-fluoroadenine
  modified_base (17)..(17): 2'-O-methyladenosine
  modified_base (18)..(18): 2'-fluoroguanine
  modified_base (19)..(19): gm
  modified_base (20)..(20): 2'-fluorouracil
  modified_base (21)..(21): 2'-O-methyladenosine
  modified_base (22)..(23): 5'-phosphonothioate
  modified_base (22)..(22): 2'-fluoroadenine
  modified_base (23)..(23): 2'-O-methyladenosine
uaggcucgaaaacacaagguaaa

SEQ ID NO: 2123 - RNA, 23 nt, Artificial Sequence
  siRNA antisense strand against APCS
  modified_base (1)..(3): 5'-phosphonothioate
  modified_base (1)..(1): 2'-fluoroadenine
  modified_base (2)..(2): um
  modified_base (3)..(3): 2'-fluorocytosine
  modified_base (4)..(4): um
  modified_base (5)..(5): 2'-fluorocytosine
  modified_base (6)..(6): um
  modified_base (7)..(7): 2'-fluorocytosine
  modified_base (8)..(8): cm
  modified_base (9)..(9): 2'-fluorocytosine
  modified_base (10)..(10): 2'-O-methyladenosine
  modified_base (11)..(11): cm
  modified_base (12)..(12): 2'-fluoroadenine
  modified_base (13)..(13): 2'-O-methyladenosine
  modified_base (14)..(14): 2'-fluoroadenine
  modified_base (15)..(15): gm
  modified_base (16)..(16): 2'-fluoroguanine
  modified_base (17)..(17): 2'-O-methyladenosine
  modified_base (18)..(18): 2'-fluorocytosine
  modified_base (19)..(19): um
  modified_base (20)..(20): 2'-fluoroguanine
  modified_base (21)..(21): gm
  modified_base (22)..(23): 5'-phosphonothioate
  modified_base (22)..(22): 2'-fluorocytosine
  modified_base (23)..(23): um
aucucucccacaaaggacuggcu

SEQ ID NO: 2124 - RNA, 23 nt, Artificial Sequence
  siRNA antisense strand against APCS
  modified_base (1)..(3): 5'-phosphonothioate
  modified_base (1)..(1): 2'-fluorouracil
  modified_base (2)..(2): gm
  modified_base (3)..(3): 2'-fluorouracil
  modified_base (4)..(4): 2'-O-methyladenosine
  modified_base (5)..(5): 2'-fluorocytosine
  modified_base (6)..(6): 2'-O-methyladenosine
  modified_base (7)..(7): 2'-fluoroadenine
  modified_base (8)..(8): 2'-O-methyladenosine
  modified_base (9)..(9): 2'-fluorouracil
  modified_base (10)..(10): cm
  modified_base (12)..(12): 2'-fluorocytosine
  modified_base (13)..(13): cm
  modified_base (14)..(14): 2'-fluoroadenine
  modified_base (15)..(15): 2'-O-methyladenosine
  modified_base (16)..(16): 2'-fluorouracil
  modified_base (17)..(17): cm
  modified_base (18)..(18): 2'-fluorouracil
  modified_base (19)..(19): cm
  modified_base (20)..(20): 2'-fluorouracil
  modified_base (21)..(21): cm
  modified_base (22)..(23): 5'-phosphonothioate
  modified_base (22)..(22): 2'-fluorocytosine
  modified_base (23)..(23): cm
uguacaaauccccaaucucuccc

SEQ ID NO: 2125 - RNA, 23 nt, Artificial Sequence
  siRNA antisense strand against APCS
  modified_base (1)..(3): 5'-phosphonothioate
  modified_base (1)..(1): 2'-fluorouracil
  modified_base (2)..(2): gm
  modified_base (3)..(3): 2'-fluoroadenine
  modified_base (4)..(4): gm
  modified_base (5)..(5): 2'-fluorouracil
  modified_base (6)..(6): cm
  modified_base (7)..(7): 2'-fluoroadenine
  modified_base (8)..(8): 2'-O-methyladenosine
  modified_base (9)..(9): 2'-fluoroguanine
  modified_base (10)..(10): 2'-O-methyladenosine
  modified_base (11)..(11): cm
  modified_base (12)..(12): 2'-fluorocytosine
  modified_base (13)..(13): um
  modified_base (14)..(14): 2'-fluorocytosine
  modified_base (15)..(15): 2'-O-methyladenosine
  modified_base (16)..(16): 2'-fluoroguanine
  modified_base (17)..(17): 2'-O-methyladenosine
  modified_base (18)..(18): 2'-fluorocytosine
  modified_base (19)..(19): cm
  modified_base (20)..(20): 2'-fluorocytosine
  modified_base (21)..(21): 2'-O-methyladenosine
  modified_base (22)..(23): 5'-phosphonothioate
  modified_base (22)..(22): 2'-fluorocytosine
  modified_base (23)..(23): 2'-O-methyladenosine
ugagucaagaccucagacccaca

SEQ ID NO: 2126 - RNA, 23 nt, Artificial Sequence
  siRNA antisense strand against APCS
  modified_base (1)..(3): 5'-phosphonothioate
  modified_base (1)..(1): 2'-fluorocytosine
  modified_base (2)..(2): 2'-O-methyladenosine
  modified_base (3)..(3): 2'-fluorouracil
  modified_base (4)..(4): um
  modified_base (5)..(5): 2'-fluorouracil
  modified_base (6)..(6): cm
  modified_base (7)..(7): 2'-fluoroadenine
  modified_base (8)..(8): um
  modified_base (9)..(9): 2'-fluorouracil
  modified_base (10)..(11): um
  modified_base (12)..(12): 2'-fluorocytosine
  modified_base (13)..(13): 2'-O-methyladenosine
  modified_base (14)..(14): 2'-fluoroadenine
  modified_base (15)..(15): gm
  modified_base (16)..(16): 2'-fluorouracil
  modified_base (17)..(17): gm
  modified_base (18)..(18): 2'-fluorocytosine
  modified_base (19)..(19): um
  modified_base (20)..(20): 2'-fluorocytosine
  modified_base (21)..(21): um
  modified_base (22)..(23): 5'-phosphonothioate
  modified_base (22)..(22): 2'-fluorocytosine
  modified_base (23)..(23): gm
cauuucauuuucaagugcucucg

SEQ ID NO: 2127 - RNA, 23 nt, Artificial Sequence
  siRNA antisense strand against APCS
  modified_base (1)..(3): 5'-phosphonothioate
  modified_base (1)..(1): 2'-fluorouracil
  modified_base (2)..(2): 2'-O-methyladenosine
  modified_base (3)..(3): 2'-fluoroadenine
  modified_base (4)..(4): gm
  modified_base (5)..(5): 2'-fluoroadenine
  modified_base (6)..(6): um
  modified_base (7)..(7): 2'-fluorocytosine
  modified_base (8)..(8): um
  modified_base (9)..(9): 2'-fluoroadenine
  modified_base (10)..(10): gm
  modified_base (11)..(11): um
  modified_base (12)..(12): 2'-fluoroadenine
  modified_base (13)..(13): um
  modified_base (14)..(14): 2'-fluorocytosine
  modified_base (15)..(15): cm
  modified_base (16)..(16): 2'-fluoroadenine
  modified_base (17)..(17): gm
  modified_base (18)..(18): 2'-fluorouracil
  modified_base (19)..(19): um
  modified_base (20)..(20): 2'-fluoroguanine
  modified_base (21)..(21): cm
  modified_base (22)..(23): 5'-phosphonothioate
  modified_base (22)..(22): 2'-fluorouracil
  modified_base (23)..(23): um
uaagaucuaguauccaguugcuu

SEQ ID NO: 2128 - RNA, 23 nt, Artificial Sequence
  siRNA antisense strand against APCS
  modified_base (1)..(3): 5'-phosphonothioate
  modified_base (1)..(1): 2'-fluorocytosine
  modified_base (2)..(2): 2'-O-methyladenosine
  modified_base (3)..(3): 2'-fluoroadenine
  modified_base (4)..(4): 2'-O-methyladenosine
  modified_base (5)..(5): 2'-fluoroguanine
  modified_base (6)..(6): 2'-O-methyladenosine
  modified_base (7)..(7): 2'-fluoroadenine
  modified_base (8)..(8): gm
  modified_base (9)..(9): 2'-fluoroadenine
  modified_base (10)..(11): 2'-O-methyladenosine
  modified_base (12)..(12): 2'-fluoroguanine
  modified_base (13)..(13): 2'-O-methyladenosine
  modified_base (14)..(14): 2'-fluoroguanine
  modified_base (15)..(15): cm
  modified_base (16)..(16): 2'-fluorouracil
  modified_base (17)..(17): gm
  modified_base (18)..(18): 2'-fluorocytosine
  modified_base (19)..(19): 2'-O-methyladenosine
  modified_base (20)..(20): 2'-fluoroguanine
  modified_base (21)..(21): 2'-O-methyladenosine
  modified_base (22)..(23): 5'-phosphonothioate
  modified_base (22)..(22): 2'-fluorouracil
  modified_base (23)..(23): gm
caaagaagaaagagcugcagaug

SEQ ID NO: 2129 - RNA, 23 nt, Artificial Sequence
  siRNA antisense strand against APCS
  modified_base (1)..(3): 5'-phosphonothioate
  modified_base (1)..(1): 2'-fluoroadenine
  modified_base (2)..(2): um
  modified_base (3)..(3): 2'-fluorouracil
  modified_base (4)..(4): cm
  modified_base (5)..(5): 2'-fluoroadenine
  modified_base (6)..(6): 2'-O-methyladenosine
  modified_base (7)..(7): 2'-fluoroadenine
  modified_base (8)..(8): gm
  modified_base (9)..(9): 2'-fluoroadenine
  modified_base (10)..(10): 2'-O-methyladenosine
  modified_base (11)..(11): gm
  modified_base (12)..(12): 2'-fluoroadenine
  modified_base (13)..(13): 2'-O-methyladenosine
  modified_base (14)..(14): 2'-fluoroadenine
  modified_base (15)..(15): gm
  modified_base (16)..(16): 2'-fluoroadenine
  modified_base (17)..(17): gm
  modified_base (18)..(18): 2'-fluorocytosine
  modified_base (19)..(19): um
  modified_base (20)..(20): 2'-fluoroguanine
  modified_base (21)..(21): cm
  modified_base (22)..(23): 5'-phosphonothioate
  modified_base (22)..(22): 2'-fluoroadenine
  modified_base (23)..(23): gm
auucaaagaagaaagagcugcag

SEQ ID NO: 2130 - RNA, 23 nt, Artificial Sequence
  siRNA antisense strand against APCS
  modified_base (1)..(3): 5'-phosphonothioate
  modified_base (1)..(1): 2'-fluoroadenine
  modified_base (2)..(2): 2'-O-methyladenosine
  modified_base (3)..(3): 2'-fluorouracil
  modified_base (4)..(4): um
  modified_base (5)..(5): 2'-fluorocytosine
  modified_base (6)..(6): 2'-O-methyladenosine
  modified_base (7)..(7): 2'-fluoroadenine
  modified_base (8)..(8): 2'-O-methyladenosine
  modified_base (9)..(9): 2'-fluoroguanine
  modified_base (10)..(11): 2'-O-methyladenosine
  modified_base (12)..(12): 2'-fluoroguanine
  modified_base (13)..(13): 2'-O-methyladenosine
  modified_base (14)..(14): 2'-fluoroadenine
  modified_base (15)..(15): 2'-O-methyladenosine
  modified_base (16)..(16): 2'-fluoroguanine
  modified_base (17)..(17): 2'-O-methyladenosine
  modified_base (18)..(18): 2'-fluoroguanine
  modified_base (19)..(19): cm
  modified_base (20)..(20): 2'-fluorouracil
  modified_base (21)..(21): gm
  modified_base (22)..(23): 5'-phosphonothioate
  modified_base (22)..(22): 2'-fluorocytosine
  modified_base (23)..(23): 2'-O-methyladenosine
aauucaaagaagaaagagcugca

SEQ ID NO: 2131 - RNA, 23 nt, Artificial Sequence
  siRNA antisense strand against APCS
  modified_base (1)..(3): 5'-phosphonothioate
  modified_base (1)..(1): 2'-fluoroadenine
  modified_base (2)..(2): cm
  modified_base (3)..(3): 2'-fluoroadenine
  modified_base (4)..(4): um
  modified_base (5)..(5): 2'-fluoroadenine
  modified_base (6)..(6): cm
  modified_base (7)..(7): 2'-fluoroadenine
  modified_base (8)..(8): gm
  modified_base (9)..(9): 2'-fluoroadenine
  modified_base (10)..(10): um
  modified_base (11)..(11): 2'-O-methyladenosine
  modified_base (12)..(12): 2'-fluoroguanine
  modified_base (13)..(13): gm
  modified_base (14)..(14): 2'-fluoroadenine
  modified_base (15)..(15): 2'-O-methyladenosine
  modified_base (16)..(16): 2'-fluoroadenine
  modified_base (17)..(17): um
  modified_base (18)..(18): 2'-fluorouracil
  modified_base (19)..(19): cm
  modified_base (20)..(20): 2'-fluoroadenine
  modified_base (21)..(21): 2'-O-methyladenosine
  modified_base (22)..(23): 5'-phosphonothioate
  modified_base (22)..(22): 2'-fluoroadenine
  modified_base (23)..(23): gm
acauacagauaggaaauucaaag

SEQ ID NO: 2132 - RNA, 23 nt, Artificial Sequence
  siRNA antisense strand against APCS
  modified_base (1)..(3): 5'-phosphonothioate
  modified_base (1)..(1): um
  modified_base (2)..(2): 2'-fluoroadenine
  modified_base (3)..(3): 2'-fluoroguanine
  modified_base (4)..(4): gm
  modified_base (5)..(5): 2'-fluorocytosine
  modified_base (6)..(6): um
  modified_base (7)..(7): 2'-fluorocytosine
  modified_base (8)..(8): gm
  modified_base (9)..(9): 2'-fluoroadenine
  modified_base (10)..(11): 2'-O-methyladenosine
  modified_base (12)..(12): 2'-fluoroadenine
  modified_base (13)..(13): cm
  modified_base (14)..(14): 2'-fluoroadenine
  modified_base (15)..(15): cm
  modified_base (16)..(16): 2'-fluoroadenine
  modified_base (17)..(17): 2'-O-methyladenosine
  modified_base (18)..(18): 2'-fluoroguanine
  modified_base (19)..(19): gm
  modified_base (20)..(20): 2'-fluorouracil
  modified_base (21)..(21): 2'-O-methyladenosine
  modified_base (22)..(23): 5'-phosphonothioate
  modified_base (22)..(22): 2'-fluoroadenine
  modified_base (23)..(23): 2'-O-methyladenosine
uaggcucgaaaacacaagguaaa

SEQ ID NO: 2133 - RNA, 23 nt, Artificial Sequence
  siRNA antisense strand against APCS
  modified_base (1)..(3): 5'-phosphonothioate
  modified_base (1)..(1): um
  modified_base (2)..(2): 2'-fluoroadenine
  modified_base (3)..(4): 2'-fluoroguanine
  modified_base (5)..(5): 2'-fluorocytosine
  modified_base (6)..(6): 2'-fluorouracil
  modified_base (7)..(7): 2'-fluorocytosine
  modified_base (8)..(8): 2'-fluoroguanine
  modified_base (9)..(9): 2'-fluoroadenine
  modified_base (10)..(11): 2'-O-methyladenosine
  modified_base (12)..(12): 2'-fluoroadenine
  modified_base (13)..(13): cm
  modified_base (14)..(14): 2'-fluoroadenine
  modified_base (15)..(15): cm
  modified_base (16)..(17): 2'-fluoroadenine
  modified_base (18)..(19): 2'-fluoroguanine
  modified_base (20)..(20): 2'-fluorouracil
  modified_base (21)..(22): 2'-fluoroadenine
  modified_base (22)..(23): 5'-phosphonothioate
  modified_base (23)..(23): 2'-O-methyladenosine
uaggcucgaaaacacaagguaaa

SEQ ID NO: 2134 - RNA, 23 nt, Artificial Sequence
  siRNA antisense strand against APCS
  modified_base (1)..(3): 5'-phosphonothioate
  modified_base (1)..(1): um
  modified_base (2)..(2): 2'-fluoroadenine
  modified_base (3)..(3): 2'-fluoroguanine
  modified_base (4)..(4): gm
  modified_base (5)..(5): 2'-fluorocytosine
  modified_base (6)..(6): um
  modified_base (7)..(7): 2'-fluorocytosine
  modified_base (8)..(8): gm
  modified_base (9)..(9): 2'-fluoroadenine
  modified_base (10)..(11): 2'-O-methyladenosine
  modified_base (12)..(12): 2'-fluoroadenine
  modified_base (13)..(13): cm
  modified_base (14)..(14): 2'-fluoroadenine
  modified_base (15)..(15): cm
  modified_base (16)..(16): 2'-fluoroadenine
  modified_base (17)..(17): 2'-O-methyladenosine
  modified_base (18)..(18): 2'-fluoroguanine
  modified_base (19)..(19): gm
  modified_base (20)..(20): um
  modified_base (21)..(23): 2'-O-methyladenosine
  modified_base (22)..(23): 5'-phosphonothioate
uaggcucgaaaacacaagguaaa

SEQ ID NO: 2135 - RNA, 23 nt, Artificial Sequence
  siRNA antisense strand against APCS
  modified_base (1)..(3): 5'-phosphonothioate
  modified_base (1)..(1): um
  modified_base (2)..(2): 2'-fluoroguanine
  modified_base (3)..(3): 2'-fluoroadenine
  modified_base (4)..(4): 2'-fluoroguanine
  modified_base (5)..(5): 2'-fluorouracil
  modified_base (6)..(6): 2'-fluorocytosine
  modified_base (7)..(8): 2'-fluoroadenine
  modified_base (9)..(9): 2'-fluoroguanine
  modified_base (10)..(10): 2'-O-methyladenosine
  modified_base (11)..(11): cm
  modified_base (12)..(12): 2'-fluorocytosine
  modified_base (13)..(13): um
  modified_base (14)..(14): 2'-fluorocytosine
  modified_base (15)..(15): 2'-O-methyladenosine
  modified_base (16)..(16): 2'-fluoroguanine
  modified_base (17)..(17): 2'-fluoroadenine
  modified_base (18)..(20): 2'-fluorocytosine
  modified_base (21)..(21): 2'-fluoroadenine
  modified_base (22)..(23): 5'-phosphonothioate
  modified_base (22)..(22): 2'-fluorocytosine
  modified_base (23)..(23): 2'-O-methyladenosine
ugagucaagaccucagacccaca

SEQ ID NO: 2136 - RNA, 23 nt, Artificial Sequence
  siRNA antisense strand against APCS
  modified_base (1)..(3): 5'-phosphonothioate
  modified_base (1)..(1): um
  modified_base (2)..(2): 2'-fluoroguanine
  modified_base (3)..(3): 2'-fluoroadenine
  modified_base (4)..(4): gm
  modified_base (5)..(5): 2'-fluorouracil
  modified_base (6)..(6): cm
  modified_base (7)..(7): 2'-fluoroadenine
  modified_base (8)..(8): 2'-O-methyladenosine
  modified_base (9)..(9): 2'-fluoroguanine
  modified_base (10)..(10): 2'-O-methyladenosine
  modified_base (11)..(11): cm
  modified_base (12)..(12): 2'-fluorocytosine
  modified_base (13)..(13): um
  modified_base (14)..(14): 2'-fluorocytosine
  modified_base (15)..(15): 2'-O-methyladenosine
  modified_base (16)..(16): 2'-fluoroguanine
  modified_base (17)..(17): 2'-O-methyladenosine
  modified_base (18)..(18): 2'-fluorocytosine
  modified_base (19)..(20): cm
  modified_base (21)..(21): 2'-O-methyladenosine
  modified_base (22)..(23): 5'-phosphonothioate
  modified_base (22)..(22): cm
  modified_base (23)..(23): 2'-O-methyladenosine
ugagucaagaccucagacccaca

SEQ ID NO: 2137 - RNA, 23 nt, Artificial Sequence
  siRNA antisense strand against APCS
  modified_base (1)..(3): 5'-phosphonothioate
  modified_base (1)..(1): cm
  modified_base (2)..(2): 2'-fluoroadenine
  modified_base (3)..(3): 2'-fluorouracil
  modified_base (4)..(4): um
  modified_base (5)..(5): 2'-fluorouracil
  modified_base (6)..(6): cm
  modified_base (7)..(7): 2'-fluoroadenine
  modified_base (8)..(8): um
  modified_base (9)..(9): 2'-fluorouracil
  modified_base (10)..(11): um
  modified_base (12)..(12): 2'-fluorocytosine
  modified_base (13)..(13): 2'-O-methyladenosine
  modified_base (14)..(14): 2'-fluoroadenine
  modified_base (15)..(15): gm
  modified_base (16)..(16): 2'-fluorouracil
  modified_base (17)..(17): gm
  modified_base (18)..(18): 2'-fluorocytosine
  modified_base (19)..(19): um
  modified_base (20)..(20): 2'-fluorocytosine
  modified_base (21)..(21): um
  modified_base (22)..(23): 5'-phosphonothioate
  modified_base (22)..(22): 2'-fluorocytosine
  modified_base (23)..(23): gm
cauuucauuuucaagugcucucg

SEQ ID NO: 2138 - RNA, 23 nt, Artificial Sequence
  siRNA antisense strand against APCS
  modified_base (1)..(3): 5'-phosphonothioate
  modified_base (1)..(1): cm
  modified_base (2)..(2): 2'-fluoroadenine
  modified_base (3)..(5): 2'-fluorouracil
  modified_base (6)..(6): 2'-fluorocytosine
  modified_base (7)..(7): 2'-fluoroadenine
  modified_base (8)..(9): 2'-fluorouracil
  modified_base (10)..(11): um
  modified_base (12)..(12): 2'-fluorocytosine
  modified_base (13)..(13): 2'-O-methyladenosine
  modified_base (14)..(14): 2'-fluoroadenine
  modified_base (15)..(15): gm
  modified_base (16)..(16): 2'-fluorouracil
  modified_base (17)..(17): 2'-fluoroguanine
  modified_base (18)..(18): 2'-fluorocytosine
  modified_base (19)..(19): 2'-fluorouracil
  modified_base (20)..(20): 2'-fluorocytosine
  modified_base (21)..(21): 2'-fluorouracil
  modified_base (22)..(23): 5'-phosphonothioate
  modified_base (22)..(22): 2'-fluorocytosine
  modified_base (23)..(23): gm
cauuucauuuucaagugcucucg

SEQ ID NO: 2139 - RNA, 23 nt, Artificial Sequence
  siRNA antisense strand against APCS
  modified_base (1)..(3): 5'-phosphonothioate
  modified_base (1)..(1): cm
  modified_base (2)..(2): 2'-fluoroadenine
  modified_base (3)..(3): 2'-fluorouracil
  modified_base (4)..(4): um
  modified_base (5)..(5): 2'-fluorouracil
  modified_base (6)..(6): cm
  modified_base (7)..(7): 2'-fluoroadenine
  modified_base (8)..(8): um
  modified_base (9)..(9): 2'-fluorouracil
  modified_base (10)..(11): um
  modified_base (12)..(12): 2'-fluorocytosine
  modified_base (13)..(13): 2'-O-methyladenosine
  modified_base (14)..(14): 2'-fluoroadenine
  modified_base (15)..(15): gm
  modified_base (16)..(16): 2'-fluorouracil
  modified_base (17)..(17): gm
  modified_base (18)..(18): 2'-fluorocytosine
  modified_base (19)..(19): um
  modified_base (20)..(20): cm
  modified_base (21)..(21): um
  modified_base (22)..(23): 5'-phosphonothioate
  modified_base (22)..(22): cm
  modified_base (23)..(23): gm
cauuucauuuucaagugcucucg

SEQ ID NO: 2140 - RNA, 23 nt, Artificial Sequence
  siRNA antisense strand against APCS
  modified_base (1)..(3): 5'-phosphonothioate
  modified_base (1)..(1): cm
  modified_base (2)..(3): 2'-fluoroadenine
  modified_base (4)..(4): 2'-O-methyladenosine
  modified_base (5)..(5): 2'-fluoroguanine
  modified_base (6)..(6): 2'-O-methyladenosine
  modified_base (7)..(7): 2'-fluoroadenine
  modified_base (8)..(8): gm
  modified_base (9)..(9): 2'-fluoroadenine
  modified_base (10)..(11): 2'-O-methyladenosine
  modified_base (12)..(12): 2'-fluoroguanine
  modified_base (13)..(13): 2'-O-methyladenosine
  modified_base (14)..(14): 2'-fluoroguanine
  modified_base (15)..(15): cm
  modified_base (16)..(16): 2'-fluorouracil
  modified_base (17)..(17): gm
  modified_base (18)..(18): 2'-fluorocytosine
  modified_base (19)..(19): 2'-O-methyladenosine
  modified_base (20)..(20): 2'-fluoroguanine
  modified_base (21)..(21): 2'-O-methyladenosine
  modified_base (22)..(23): 5'-phosphonothioate
  modified_base (22)..(22): 2'-fluorouracil
  modified_base (23)..(23): gm
caaagaagaaagagcugcagaug

SEQ ID NO: 2141 - RNA, 23 nt, Artificial Sequence
  siRNA antisense strand against APCS
  modified_base (1)..(3): 5'-phosphonothioate
  modified_base (1)..(1): cm
  modified_base (2)..(4): 2'-fluoroadenine
  modified_base (5)..(5): 2'-fluoroguanine
  modified_base (6)..(7): 2'-fluoroadenine
  modified_base (8)..(8): 2'-fluoroguanine
  modified_base (9)..(9): 2'-fluoroadenine
  modified_base (10)..(11): 2'-O-methyladenosine
  modified_base (12)..(12): 2'-fluoroguanine
  modified_base (13)..(13): 2'-O-methyladenosine
  modified_base (14)..(14): 2'-fluoroguanine
  modified_base (15)..(15): cm
  modified_base (16)..(16): 2'-fluorouracil
  modified_base (17)..(17): 2'-fluoroguanine
  modified_base (18)..(18): 2'-fluorocytosine
  modified_base (19)..(19): 2'-fluoroadenine
  modified_base (20)..(20): 2'-fluoroguanine
  modified_base (21)..(21): 2'-fluoroadenine
  modified_base (22)..(23): 5'-phosphonothioate
  modified_base (22)..(22): 2'-fluorouracil
  modified_base (23)..(23): gm
caaagaagaaagagcugcagaug

SEQ ID NO: 2142 - RNA, 23 nt, Artificial Sequence
  siRNA antisense strand against APCS
  modified_base (1)..(3): 5'-phosphonothioate
  modified_base (1)..(1): cm
  modified_base (2)..(3): 2'-fluoroadenine
  modified_base (4)..(4): 2'-O-methyladenosine
  modified_base (5)..(5): 2'-fluoroguanine
  modified_base (6)..(6): 2'-O-methyladenosine
  modified_base (7)..(7): 2'-fluoroadenine
  modified_base (8)..(8): gm
  modified_base (9)..(9): 2'-fluoroadenine
  modified_base (10)..(11): 2'-O-methyladenosine
  modified_base (12)..(12): 2'-fluoroguanine
  modified_base (13)..(13): 2'-O-methyladenosine
  modified_base (14)..(14): 2'-fluoroguanine
  modified_base (15)..(15): cm
  modified_base (16)..(16): 2'-fluorouracil
  modified_base (17)..(17): gm
  modified_base (18)..(18): 2'-fluorocytosine
  modified_base (19)..(19): 2'-O-methyladenosine
  modified_base (20)..(20): gm
  modified_base (21)..(21): 2'-O-methyladenosine
  modified_base (22)..(23): 5'-phosphonothioate
  modified_base (22)..(22): um
  modified_base (23)..(23): gm
caaagaagaaagagcugcagaug

SEQ ID NO: 2143 - RNA, 23 nt, Artificial Sequence
  siRNA antisense strand against APCS
  modified_base (1)..(3): 5'-phosphonothioate
  modified_base (1)..(1): 2'-O-methyladenosine
  modified_base (2)..(3): 2'-fluorouracil
  modified_base (4)..(4): 2'-fluorocytosine
  modified_base (5)..(7): 2'-fluoroadenine
  modified_base (8)..(8): 2'-fluoroguanine
  modified_base (9)..(9): 2'-fluoroadenine
  modified_base (10)..(10): 2'-O-methyladenosine
  modified_base (11)..(11): gm
  modified_base (12)..(12): 2'-fluoroadenine
  modified_base (13)..(13): 2'-O-methyladenosine
  modified_base (14)..(14): 2'-fluoroadenine
  modified_base (15)..(15): gm
  modified_base (16)..(16): 2'-fluoroadenine
  modified_base (17)..(17): 2'-fluoroguanine
  modified_base (18)..(18): 2'-fluorocytosine
  modified_base (19)..(19): 2'-fluorouracil
  modified_base (20)..(20): 2'-fluoroguanine
  modified_base (21)..(21): 2'-fluorocytosine
  modified_base (22)..(23): 5'-phosphonothioate
  modified_base (22)..(22): 2'-fluoroadenine
  modified_base (23)..(23): gm
auucaaagaagaaagagcugcag

SEQ ID NO: 2144 - RNA, 23 nt, Artificial Sequence
  siRNA antisense strand against APCS
  modified_base (1)..(3): 5'-phosphonothioate
  modified_base (1)..(1): 2'-O-methyladenosine
  modified_base (2)..(3): 2'-fluorouracil
  modified_base (4)..(4): cm
  modified_base (5)..(5): 2'-fluoroadenine
  modified_base (6)..(6): 2'-O-methyladenosine
  modified_base (7)..(7): 2'-fluoroadenine
  modified_base (8)..(8): gm
  modified_base (9)..(9): 2'-fluoroadenine
  modified_base (10)..(10): 2'-O-methyladenosine
  modified_base (11)..(11): gm
  modified_base (12)..(12): 2'-fluoroadenine
  modified_base (13)..(13): 2'-O-methyladenosine
  modified_base (14)..(14): 2'-fluoroadenine
  modified_base (15)..(15): gm
  modified_base (16)..(16): 2'-fluoroadenine
  modified_base (17)..(17): gm
  modified_base (18)..(18): 2'-fluorocytosine
  modified_base (19)..(19): um
  modified_base (20)..(20): gm
  modified_base (21)..(21): cm
  modified_base (22)..(23): 5'-phosphonothioate
  modified_base (22)..(22): 2'-O-methyladenosine
  modified_base (23)..(23): gm
auucaaagaagaaagagcugcag

SEQ ID NO: 2145 - RNA, 23 nt, Artificial Sequence
  siRNA antisense strand against APCS
  modified_base (1)..(3): 5'-phosphonothioate
  modified_base (1)..(1): 2'-O-methyladenosine
  modified_base (2)..(2): 2'-fluoroadenine
  modified_base (3)..(4): 2'-fluorouracil
  modified_base (5)..(5): 2'-fluorocytosine
  modified_base (6)..(8): 2'-fluoroadenine
  modified_base (9)..(9): 2'-fluoroguanine
  modified_base (10)..(10): 2'-O-methyladenosine
  modified_base (11)..(11): 2'-O-methyladenosine
  modified_base (12)..(12): 2'-fluoroguanine
  modified_base (13)..(13): 2'-O-methyladenosine
  modified_base (14)..(14): 2'-fluoroadenine
  modified_base (15)..(15): 2'-O-methyladenosine
  modified_base (16)..(16): 2'-fluoroguanine
  modified_base (17)..(17): 2'-fluoroadenine
  modified_base (18)..(18): 2'-fluoroguanine
  modified_base (19)..(19): 2'-fluorocytosine
  modified_base (20)..(20): 2'-fluorouracil
  modified_base (21)..(21): 2'-fluoroguanine
  modified_base (22)..(23): 5'-phosphonothioate
  modified_base (22)..(22): 2'-fluorocytosine
  modified_base (23)..(23): 2'-O-methyladenosine
aauucaaagaagaaagagcugca

SEQ ID NO: 2146 - RNA, 23 nt, Artificial Sequence
  siRNA antisense strand against APCS
  modified_base (1)..(3): 5'-phosphonothioate
  modified_base (1)..(1): 2'-O-methyladenosine
  modified_base (2)..(2): 2'-fluoroadenine
  modified_base (3)..(3): 2'-fluorouracil
  modified_base (4)..(4): um
  modified_base (5)..(5): 2'-fluorocytosine
  modified_base (6)..(6): 2'-O-methyladenosine
  modified_base (7)..(7): 2'-fluoroadenine
  modified_base (8)..(8): 2'-O-methyladenosine
  modified_base (9)..(9): 2'-fluoroguanine
  modified_base (10)..(11): 2'-O-methyladenosine
  modified_base (12)..(12): 2'-fluoroguanine
  modified_base (13)..(13): 2'-O-methyladenosine
  modified_base (14)..(14): 2'-fluoroadenine
  modified_base (15)..(15): 2'-O-methyladenosine
  modified_base (16)..(16): 2'-fluoroguanine
  modified_base (17)..(17): 2'-O-methyladenosine
  modified_base (18)..(18): 2'-fluoroguanine
  modified_base (19)..(19): cm
  modified_base (20)..(20): um
  modified_base (21)..(21): gm
  modified_base (22)..(23): 5'-phosphonothioate
  modified_base (22)..(22): cm
  modified_base (23)..(23): 2'-O-methyladenosine
aauucaaagaagaaagagcugca

SEQ ID NO: 2147 - RNA, 23 nt, Artificial Sequence
  siRNA antisense strand against APCS
  modified_base (1)..(3): 5'-phosphonothioate
  modified_base (1)..(1): 2'-O-methyladenosine
  modified_base (2)..(2): 2'-fluorocytosine
  modified_base (3)..(3): 2'-fluoroadenine
  modified_base (4)..(4): 2'-fluorouracil
  modified_base (5)..(5): 2'-fluoroadenine
  modified_base (6)..(6): 2'-fluorocytosine
  modified_base (7)..(7): 2'-fluoroadenine
  modified_base (8)..(8): 2'-fluoroguanine
  modified_base (9)..(9): 2'-fluoroadenine
  modified_base (10)..(10): um
  modified_base (11)..(11): 2'-O-methyladenosine
  modified_base (12)..(12): 2'-fluoroguanine
  modified_base (13)..(13): gm
  modified_base (14)..(14): 2'-fluoroadenine
  modified_base (15)..(15): 2'-O-methyladenosine
  modified_base (16)..(16): 2'-fluoroadenine
  modified_base (17)..(18): 2'-fluorouracil
  modified_base (19)..(19): 2'-fluorocytosine
  modified_base (20)..(22): 2'-fluoroadenine
  modified_base (22)..(23): 5'-phosphonothioate
  modified_base (23)..(23): gm
acauacagauaggaaauucaaag

SEQ ID NO: 2148 - RNA, 23 nt, Artificial Sequence
  siRNA antisense strand against APCS
  modified_base (1)..(3): 5'-phosphonothioate
  modified_base (1)..(1): 2'-O-methyladenosine
  modified_base (2)..(2): 2'-fluorocytosine
  modified_base (3)..(3): 2'-fluoroadenine
  modified_base (4)..(4): um
  modified_base (5)..(5): 2'-fluoroadenine
  modified_base (6)..(6): cm
  modified_base (7)..(7): 2'-fluoroadenine
  modified_base (8)..(8): gm
  modified_base (9)..(9): 2'-fluoroadenine
  modified_base (10)..(10): um
  modified_base (11)..(11): 2'-O-methyladenosine
  modified_base (12)..(12): 2'-fluoroguanine
  modified_base (13)..(13): gm
  modified_base (14)..(14): 2'-fluoroadenine
  modified_base (15)..(15): 2'-O-methyladenosine
  modified_base (16)..(16): 2'-fluoroadenine
  modified_base (17)..(17): um
  modified_base (18)..(18): 2'-fluorouracil
  modified_base (19)..(19): cm
  modified_base (20)..(22): 2'-O-methyladenosine
  modified_base (22)..(23): 5'-phosphonothioate
  modified_base (23)..(23): gm
acauacagauaggaaauucaaag

SEQ ID NO: 2149 - RNA, 23 nt, Artificial Sequence
  siRNA antisense strand against APCS
  modified_base (1)..(3): 5'-phosphonothioate
  modified_base (1)..(1): 2'-fluorouracil
  modified_base (2)..(2): 2'-O-methyladenosine
  modified_base (3)..(3): 2'-fluorouracil
  modified_base (4)..(4): um
  modified_base (5)..(5): 2'-fluorouracil
  modified_base (6)..(6): cm
  modified_base (7)..(7): 2'-fluoroadenine
  modified_base (8)..(8): um
  modified_base (9)..(9): 2'-fluorouracil
  modified_base (10)..(11): um
  modified_base (12)..(12): 2'-fluorocytosine
  modified_base (13)..(13): 2'-O-methyladenosine
  modified_base (14)..(14): 2'-fluoroadenine
  modified_base (15)..(15): gm
  modified_base (16)..(16): 2'-fluorouracil
  modified_base (17)..(17): gm
  modified_base (18)..(18): 2'-fluorocytosine
  modified_base (19)..(19): um
  modified_base (20)..(20): 2'-fluorocytosine
  modified_base (21)..(21): um
  modified_base (22)..(23): 5'-phosphonothioate
  modified_base (22)..(22): 2'-fluorocytosine
  modified_base (23)..(23): gm
uauuucauuuucaagugcucucg

SEQ ID NO: 2150 - RNA, 23 nt, Artificial Sequence
  siRNA antisense strand against APCS
  modified_base (1)..(3): 5'-phosphonothioate
  modified_base (1)..(1): um
  modified_base (2)..(2): 2'-fluoroadenine
  modified_base (3)..(5): 2'-fluorouracil
  modified_base (6)..(6): 2'-fluorocytosine
  modified_base (7)..(7): 2'-fluoroadenine
  modified_base (8)..(9): 2'-fluorouracil
  modified_base (10)..(11): um
  modified_base (12)..(12): 2'-fluorocytosine
  modified_base (13)..(13): 2'-O-methyladenosine
  modified_base (14)..(14): 2'-fluoroadenine
  modified_base (15)..(15): gm
  modified_base (16)..(16): 2'-fluorouracil
  modified_base (17)..(17): 2'-fluoroguanine
  modified_base (18)..(18): 2'-fluorocytosine
  modified_base (19)..(19): 2'-fluorouracil
  modified_base (20)..(20): 2'-fluorocytosine
  modified_base (21)..(21): 2'-fluorouracil
  modified_base (22)..(23): 5'-phosphonothioate
  modified_base (22)..(22): 2'-fluorocytosine
  modified_base (23)..(23): gm
uauuucauuuucaagugcucucg

SEQ ID NO: 2151 - RNA, 23 nt, Artificial Sequence
  siRNA antisense strand against APCS
  modified_base (1)..(3): 5'-phosphonothioate
  modified_base (1)..(1): um
  modified_base (2)..(2): 2'-fluoroadenine
  modified_base (3)..(3): 2'-fluorouracil
  modified_base (4)..(4): um
  modified_base (5)..(5): 2'-fluorouracil
  modified_base (6)..(6): cm
  modified_base (7)..(7): 2'-fluoroadenine
  modified_base (8)..(8): um
  modified_base (9)..(9): 2'-fluorouracil
  modified_base (10)..(11): um
  modified_base (12)..(12): 2'-fluorocytosine
  modified_base (13)..(13): 2'-O-methyladenosine
  modified_base (14)..(14): 2'-fluoroadenine
  modified_base (15)..(15): gm
  modified_base (16)..(16): 2'-fluorouracil
  modified_base (17)..(17): gm
  modified_base (18)..(18): 2'-fluorocytosine
  modified_base (19)..(19): um
  modified_base (20)..(20): cm
  modified_base (21)..(21): um
  modified_base (22)..(23): 5'-phosphonothioate
  modified_base (22)..(22): cm
  modified_base (23)..(23): gm
uauuucauuuucaagugcucucg

SEQ ID NO: 2152 - RNA, 23 nt, Artificial Sequence
  siRNA antisense strand against APCS
  modified_base (1)..(3): 5'-phosphonothioate
  modified_base (1)..(1): 2'-fluorouracil
  modified_base (2)..(2): 2'-O-methyladenosine
  modified_base (3)..(3): 2'-fluoroadenine
  modified_base (4)..(4): 2'-O-methyladenosine
  modified_base (5)..(5): 2'-fluoroguanine
  modified_base (6)..(6): 2'-O-methyladenosine
  modified_base (7)..(7): 2'-fluoroadenine
  modified_base (8)..(8): gm
  modified_base (9)..(9): 2'-fluoroadenine
  modified_base (10)..(11): 2'-O-methyladenosine
  modified_base (12)..(12): 2'-fluoroguanine
  modified_base (13)..(13): 2'-O-methyladenosine
  modified_base (14)..(14): 2'-fluoroguanine
  modified_base (15)..(15): cm
  modified_base (16)..(16): 2'-fluorouracil
  modified_base (17)..(17): gm
  modified_base (18)..(18): 2'-fluorocytosine
  modified_base (19)..(19): 2'-O-methyladenosine
  modified_base (20)..(20): 2'-fluoroguanine
  modified_base (21)..(21): 2'-O-methyladenosine
  modified_base (22)..(23): 5'-phosphonothioate
  modified_base (22)..(22): 2'-fluorouracil
  modified_base (23)..(23): gm
uaaagaagaaagagcugcagaug

SEQ ID NO: 2153 - RNA, 23 nt, Artificial Sequence
  siRNA antisense strand against APCS
  modified_base (1)..(3): 5'-phosphonothioate
  modified_base (1)..(1): um
  modified_base (2)..(4): 2'-fluoroadenine
  modified_base (5)..(5): 2'-fluoroguanine
  modified_base (6)..(7): 2'-fluoroadenine
  modified_base (8)..(8): 2'-fluoroguanine
  modified_base (9)..(9): 2'-fluoroadenine
  modified_base (10)..(11): 2'-O-methyladenosine
  modified_base (12)..(12): 2'-fluoroguanine
  modified_base (13)..(13): 2'-O-methyladenosine
  modified_base (14)..(14): 2'-fluoroguanine
  modified_base (15)..(15): cm
  modified_base (16)..(16): 2'-fluorouracil
  modified_base (17)..(17): 2'-fluoroguanine
  modified_base (18)..(18): 2'-fluorocytosine
  modified_base (19)..(19): 2'-fluoroadenine
  modified_base (20)..(20): 2'-fluoroguanine
  modified_base (21)..(21): 2'-fluoroadenine
  modified_base (22)..(23): 5'-phosphonothioate
  modified_base (22)..(22): 2'-fluorouracil
  modified_base (23)..(23): gm
uaaagaagaaagagcugcagaug

SEQ ID NO: 2154 - RNA, 23 nt, Artificial Sequence
  siRNA antisense strand against APCS
  modified_base (1)..(3): 5'-phosphonothioate
  modified_base (1)..(1): um
  modified_base (2)..(3): 2'-fluoroadenine
  modified_base (4)..(4): 2'-O-methyladenosine
  modified_base (5)..(5): 2'-fluoroguanine
  modified_base (6)..(6): 2'-O-methyladenosine
  modified_base (7)..(7): 2'-fluoroadenine
  modified_base (8)..(8): gm
  modified_base (9)..(9): 2'-fluoroadenine
  modified_base (10)..(11): 2'-O-methyladenosine
  modified_base (12)..(12): 2'-fluoroguanine
  modified_base (13)..(13): 2'-O-methyladenosine
  modified_base (14)..(14): 2'-fluoroguanine
  modified_base (15)..(15): cm
  modified_base (16)..(16): 2'-fluorouracil
  modified_base (17)..(17): gm
  modified_base (18)..(18): 2'-fluorocytosine
  modified_base (19)..(19): 2'-O-methyladenosine
  modified_base (20)..(20): gm
  modified_base (21)..(21): 2'-O-methyladenosine
  modified_base (22)..(23): 5'-phosphonothioate
  modified_base (22)..(22): um
  modified_base (23)..(23): gm
uaaagaagaaagagcugcagaug

1. A nucleic acid conjugate represented by the following formula 1: [chemical structure]
wherein
X is a double-stranded nucleic acid consisting of a sense strand and an antisense strand and comprising a duplex region of at least 11 base pairs, wherein in the double-stranded nucleic acid, an oligonucleotide strand having a chain length of 17 to 30 nucleotides in the antisense strand is complementary to any of target APCS mRNA sequences described in Tables 1-1 to 1-13, and a 3′ end or a 5′ end of the sense strand binds to S3,
L1 and L2 are each independently a sugar ligand, and
S1, S2 and S3 are each independently a linker.

2. The nucleic acid conjugate according to claim 1, wherein the nucleic acid conjugate has a structure represented by the following formula 2: [chemical structure]
wherein
X, L1, L2 and S3 are each as defined above,
P1, P2, P3, P4, P5 and P6, and T1 and T2 are each independently absent, or —CO—, —NH—, —O—, —S—, —O—CO—, —S—CO—, —NH—CO—, —CO—O—, —CO—S— or —CO—NH—,
Q1, Q2, Q3 and Q4 are each independently absent, or substituted or unsubstituted alkylene having 1 to 12 carbon atoms or —(CH₂CH₂O)ₙ—CH₂CH₂— wherein n is an integer of 0 to 99,
B1 and B2 are each independently a bond, or any structure represented by the following formula 2-1, wherein each of the terminal dots in each structure is a binding site to P2 or P3, or P5 or P6, and m1, m2, m3 and m4 are each independently an integer of 0 to 10: [chemical structure]
p1 and p2 are each independently an integer of 1, 2 or 3, and
q1, q2, q3 and q4 are each independently an integer of 0 to 10,
provided that when each of p1 and p2 is an integer of 2 or 3, each P3 and P6, Q2 and Q4, T1 and T2 or L1 and L2 are the same or different, and when q1 to q4 are 2 to 10, combinations -[P2-Q1]-, -[Q2-P3]—, -[P5-Q3]- or -[Q4-P6]- are the same or different.

3. The nucleic acid conjugate according to claim 2, wherein P1 and P4 are each independently —CO—NH—, —NH—CO— or —O—.

4. The nucleic acid conjugate according to claim 2, wherein -[P2-Q1]_{q1}- and -[P5-Q3]_{q3}- are each independently absent, or any structure represented by the following formulas 3-1 to 3-3: [chemical structure]
wherein
m5 and m6 are each independently an integer of 0 to 10, and each of the terminal dots in the structures of formulas 3-1 to 3-3 is a binding site to B1 or B2, or P1 or P4.

5. The nucleic acid conjugate according to claim 2, wherein the nucleic acid conjugate has any structure represented by the following formulas 4-1 to 4-9: [chemical structure] [chemical structure] [chemical structure]
wherein
X, L1, L2, S3, P3, P6, T1, T2, Q2, Q4, q2 and q4 are each as defined above.

6. The nucleic acid conjugate according to claim 1, wherein the nucleic acid conjugate has a structure represented by the following formula 5: [chemical structure]
wherein
X, S3, P1, P2, P3, Q1, Q2, B1, T1, L1, p1, q1 and q2 are each as defined above.

7. The nucleic acid conjugate according to claim 6, wherein P1 is —CO—NH—, —NH—CO— or —O—.

8. The nucleic acid conjugate according to claim 6, wherein the nucleic acid conjugate has any structure represented by the following formulas 6-1 to 6-9: [chemical structure] [chemical structure] [chemical structure]
wherein
X, S3, P3, Q2, T1, L1 and q2 are each as defined above.

9. The nucleic acid conjugate according to claim 2, wherein the nucleic acid conjugate has any structure represented by the following formulas 7-1 to 7-9: [chemical structure] [chemical structure] [chemical structure]
wherein
X, S3, L1 and L2 are each as defined above.

10. The nucleic acid conjugate according to claim 1, wherein the sugar ligand is N-acetylgalactosamine.

11. The nucleic acid conjugate according to claim 1, wherein the double-stranded nucleic acid comprises a modified nucleotide.

12. The nucleic acid conjugate according to claim 1, wherein the 3′ end of the sense strand and the 5′ end of the antisense strand each form a blunt end.

13. The nucleic acid conjugate according to claim 11, wherein the double-stranded nucleic acid comprises a nucleotide modified at the sugar moiety.

14. The nucleic acid conjugate according to claim 1, wherein the nucleic acid conjugate has a structure represented by the following formula 7-8-1: [chemical structure]
wherein X is as defined above.

15. The nucleic acid conjugate according to claim 1, wherein X is a pair of sense strand/antisense strand selected from the group consisting of sense strands/antisense strands described in Tables 1-1 to 1-13.

16. The nucleic acid conjugate according to claim 1, wherein X is a pair of sense strand/antisense strand selected from the group consisting of sense strands/antisense strands described in Tables M1-1 to M1-3, R-1 to R-2 and R-3 to R-4.

17. (canceled)

18. (canceled)

19. (canceled)

20. A method for treating or preventing a disease, comprising administering a nucleic acid conjugate according to claim 1 to a patient in need thereof.

21. A method for inhibiting the expression of APCS gene, comprising transferring a double-stranded nucleic acid into a cell using a nucleic acid conjugate according to claim 1.

22. A method for treating an amyloid-related disease, comprising administering a nucleic acid conjugate according to claim 1 to a mammal.

23. (canceled)

24. (canceled)

25. The treatment method according to claim 22, wherein the amyloid-related disease is a disease caused by a disorder mediated by amyloid fibrils containing APCS.

26. (canceled)

27. (canceled)
